(19) United States
(12) Patent Application Publication
(10) Pub. No.: US 2018/0142222 A1
(43) Pub. Date: May 24, 2018

(54) REPORTER CAS9 VARIANTS AND METHODS OF USE THEREOF

(71) Applicant: The Regents of the University of California, Oakland, CA (US)

(72) Inventors: Samuel H. Sternberg, El Cerrito, CA (US); Jennifer A. Doudna, Berkeley, CA (US); Benjamin LaFrance, Berkeley, CA (US); Janice S. Chen, Berkeley, CA (US)

(73) Assignee: The Regents of the University of California, Oakland, CA (US)

(21) Appl. No.: 15/574,748

(22) PCT Filed: Jun. 9, 2016
(86) PCT No.: PCT/US16/36754

§ 371 Date: Nov. 16, 2017

Related U.S. Application Data
(60) Provisional application No. 62/174,804, filed on Jun. 12, 2015.

(51) Int. Cl. C12N 9/22; C12Q 1/6876; C12Q 1/44

(52) U.S. Cl. CPC C12N 9/22; G01N 2333/922; C12Q 1/44; C12Q 1/6876

(57) ABSTRACT

The present disclosure provides variant Cas9 proteins (e.g., reporter Cas9 proteins), nucleic acids encoding the variant Cas9 proteins, and host cells comprising the nucleic acids. The present disclosure provides systems and kits that include a subject variant Cas9 protein (e.g., reporter Cas9 proteins) (and/or a nucleic acid encoding the variant Cas9 protein). The variant Cas9 proteins (e.g., reporter Cas9 proteins) and the nucleic acids encoding the variant Cas9 proteins are useful in a wide variety of methods (including the detection of a conformational change of the variant Cas9 protein), which are also provided.

### CROSS-REFERENCE

[0001] This application claims the benefit of U.S. Provisional Patent Application No. 62/174,804, filed Jun. 12, 2015, which application is incorporated herein by reference in its entirety.

### INCORPORATION BY REFERENCE OF SEQUENCE LISTING PROVIDED AS A TEXT FILE

[0002] A Sequence Listing is provided herewith as a text file, “BERK-282WO_SeqList_ST25.txt” created on Jun. 9, 2016 and having a size of 8,016 KB. The contents of the text file are incorporated by reference herein in their entirety.

### INTRODUCTION

[0003] RNA-mediated adaptive immune systems in bacteria and archaea rely on Clustered Regularly Interspaced Short Palindromic Repeat (CRISPR) genomic loci and CRISPR-associated (Cas) proteins that function together to provide protection from invading viruses and plasmids. In Type II CRISPR-Cas systems, the Cas9 protein functions as an RNA-guided endonuclease that uses a dual-guide RNA consisting of crRNA and trans-activating crRNA (tracrRNA) for target recognition and cleavage by a mechanism involving two nuclease active sites that together generate double-stranded DNA breaks (DSBs).

[0004] RNA-programmed Cas9 has proven to be a versatile tool for genome engineering in multiple cell types and organisms. Guided by a dual-RNA complex or a chimeric single-guide RNA, Cas9 (or variants of Cas9 such as nickase variants) can generate site-specific DSBs or single-stranded breaks (SSBs) within target nucleic acids. Target nucleic acids can include double-stranded DNA (dsDNA) and single-stranded DNA (ssDNA) as well as RNA. When cleavage of a target nucleic acid occurs within a cell (e.g., a eukaryotic cell), the break in the target nucleic acid can be repaired by non-homologous end joining (NHEJ) or homology directed repair (HDR).

[0005] Thus, the Cas9 system provides a facile means of modifying genomic information. In addition, catalytically inactive Cas9 alone or fused to transcriptional activator or repressor domains can be used to alter transcription levels at sites within target nucleic acids by binding to the target site without cleavage.

### SUMMARY

[0006] The present disclosure provides variant Cas9 proteins (e.g., reporter Cas9 proteins), nucleic acids encoding the variant Cas9 proteins, and host cells comprising the nucleic acids. The present disclosure provides systems and kits that include a subject variant Cas9 protein (e.g., reporter Cas9 proteins) (and/or a nucleic acid encoding the variant Cas9 protein). The variant Cas9 proteins (e.g., reporter Cas9 proteins) and the nucleic acids encoding the variant Cas9 proteins are useful in a wide variety of methods (including the detection of a conformational change of the variant Cas9 protein), which are also provided.

[0007] For example, the present disclosure provides a reporter Cas9 protein that includes: a signal pair that produces a detectable signal, where the signal pair includes a first and a second signal partner, wherein the distance between the first and second signal partners increases or decreases as a result of a conformational change of the reporter Cas9 protein, where: (a) the first signal partner is a signal moiety that produces the detectable signal and the second signal partner is a quencher moiety that quenches the detectable signal; or (b) the first signal partner is a fluorescence resonance energy transfer (FRET) donor moiety and the second signal partner is a FRET acceptor moiety that produces the detectable signal; and where an increase or decrease in the distance between the first and second signal partners causes a change in the amount of the detectable signal produced by the signal pair.

[0008] The present disclosure provides a variant Cas9 protein, or a nucleic acid encoding the variant Cas9 protein, where the variant Cas9 protein includes: a first and a second cysteine residue, wherein the distance between the first and second cysteine residues increases or decreases as a result of a conformational change of the variant Cas9 protein, where the conformational change results from: (a) binding of the variant Cas9 protein to a Cas9 guide RNA, or (b) on-target binding of a Cas9 complex, comprising the variant Cas9 protein and a Cas9 guide RNA, to a target nucleic acid molecule; and where the variant Cas9 protein lacks the naturally occurring cysteine residues of a corresponding wild type Cas9 protein.

[0009] The present disclosure also provides methods such as: methods of detecting a conformational change in a reporter Cas9 protein, methods of detecting the binding of a reporter Cas9 protein to a Cas9 guide RNA, methods of detecting on-target binding of a Cas9 complex (that includes a Cas9 guide RNA and a reporter Cas9 protein) to a target nucleic acid, and methods of labeling a variant Cas9 protein to generate a reporter Cas9 protein.

[0010] The present disclosure also provides kits and systems for practicing the provided methods. For example, the present disclosure provides kits that include: a subject variant Cas9 protein (e.g., one have two non-naturally existing cysteines), or a nucleic acid encoding the variant Cas9 protein; and one or more of: a signal moiety, a quencher moiety, a signal pair comprising a signal moiety and a quencher moiety, a fluorescence resonance energy transfer (FRET) donor moiety, a FRET acceptor moiety, and a FRET pair comprising a FRET donor moiety and a FRET acceptor moiety.

### BRIEF DESCRIPTION OF THE DRAWINGS

[0011] FIG. 1A-1D present data related to sgRNA driving inward lobe closure of Cas9.

[0012] FIG. 2A-2E present data related to FRET experiments revealing an activated conformation of the HNH nuclease domain

[0013] FIG. 3A-3D present data related to RuvC nuclease activity allosterically controlled by HNH conformational changes.

[0014] FIG. 4A-4D present data related to the mechanism of communication between the HNH and RuvC nuclease domains to achieve concerted DNA cleavage. FIG. 4C: Spy (SEQ ID NO: 1631), Sth3 (SEQ ID NO: 1632), Sth1 (SEQ ID NO: 1633), Cje (SEQ ID NO: 1634), Nme (SEQ ID NO: 1635).

[0015] FIG. 5 presents a procedure that can be used to differentially label a subject variant Cas9 protein with a FRET pair (a FRET donor moiety and a FRET acceptor moiety), where the variant Cas9 includes a pair of non-naturally cysteines positioned such that once labeled, the resulting reporter Cas9 protein can be used to monitor/detect conformational changes.

[0016] FIG. 6A-6B present data related to using a variant Cas9 protein (labeled such that it is a reporter Cas9 protein) for high-to-low FRET detection (Cas9 guide RNA binding), where the variant Cas9 protein includes the following amino acid substitutions: C80S, C574S, E945C, and D435C.

[0017] FIG. 7A-7B present data related to using a variant Cas9 protein (labeled such that it is a reporter Cas9 protein) for low-to-high FRET detection (on-target nucleic acid binding), where the variant Cas9 protein includes the following amino acid substitutions: C80S, C574S, S867C, and S355C.

[0018] FIG. 8A-8B present data related to using a variant Cas9 protein (labeled such that it is a reporter Cas9 protein) for high-to-low FRET detection (on-target nucleic acid binding), where the variant Cas9 protein includes the following amino acid substitutions: C80S, C574S, S867C, and N1054C.

[0019] FIG. 9A-9D present schematics and data related to FRET experiments revealing an activated conformation related to the Helical-II domain.

[0020] FIG. 10A-10F present schematics and data related to FRET experiments revealing an activated conformation related to the Helical-III domain.

### DEFINITIONS

[0021] The terms “polynucleotide” and “nucleic acid,” used interchangeably herein, refer to a polymeric form of nucleotides of any length, either ribonucleotides or deoxynucleotides. Thus, this term includes, but is not limited to, single-, double-, or multi-stranded DNA or RNA, genomic DNA, cDNA, DNA-RNA hybrids, or a polymer comprising purine and pyrimidine bases or other natural, chemically or biochemically modified, non-natural, or derivatized nucleotide bases. The terms “polynucleotide” and “nucleic acid” should be understood to include, as applicable to the embodiment being described, single-stranded (such as sense or antisense) and double-stranded polynucleotides.

[0022] The terms “peptide,” “polypeptide,” and “protein” are used interchangeably herein, and refer to a polymeric form of amino acids of any length, which can include coded and non-coded amino acids, chemically or biochemically modified or derivatized amino acids, and polypeptides having modified peptide backbones.

[0023] The term “naturally-occurring” as used herein as applied to a nucleic acid, a protein, a cell, or an organism, refers to a nucleic acid, protein, cell, or organism that is found in nature. For example, a polypeptide or polynucleotide sequence that is present in an organism (including viruses) that can be isolated from a source in nature and which has not been intentionally modified by a human in the laboratory is naturally occurring.

[0024] As used herein the term “isolated” is meant to describe a polynucleotide, a polypeptide, or a cell that is in an environment different from that in which the polynucleotide, the polypeptide, or the cell naturally occurs. An isolated genetically modified host cell may be present in a mixed population of genetically modified host cells.

[0025] As used herein, the terms “label”, “detectable label,” “signal moiety,” and “tag” refer interchangeably to a molecule that is attached to or associated with another molecule and that can be directly (i.e., a primary label) or indirectly (i.e., a secondary label) detected. For example, a label can be visualized and/or measured and/or otherwise identified so that its presence, absence, or a parameter or characteristic thereof can be measured and/or determined.

[0026] As used herein, the term “fluorescent label” (a signal moiety) refers to any molecule that can be detected via its fluorescent properties, which include fluorescence detectable upon excitation. Suitable fluorescent labels include, but are not limited to, fluorescein, rhodamine, tetramethylrhodamine, eosin, erythrosin, coumarin, methyl-coumarins, pyrene, malachite green, stilbene derivatives, Lucifer yellow, Cascade Blue, Texas Red, IAEDANS, EDANS, boron-dipyrromethene (BODIPY), LC Red 640, LC Red 705, cyanine dyes such as Cy3, Cy 5 and Cy 5.5, and Oregon green, as well as to fluorescent derivatives thereof. Suitable optical dyes are described in The Handbook: A Guide to Fluorescent Probes and Labeling Technologies. 2005, Haugland, R P. 10.sup.th ed. Invitrogen/Molecular Probes; Carlsbad, Calif. Additional labels include but are not limited to fluorescent proteins, such as green fluorescent protein (GFP), yellow fluorescent protein (YFP), blue fluorescent protein (BFP), cyan fluorescent protein (CFP) etc.

[0027] “Heterologous,” as used herein, means a nucleotide or polypeptide sequence that is not found in the native nucleic acid or protein, respectively. For example, a subject variant Cas9 protein can be a chimeric variant Cas9 protein that includes a heterologous amino acid sequence (e.g., a fusion partner). Thus, a subject variant Cas9 protein can be a chimeric variant Cas9 protein that includes: (i) a variant Cas9 protein (e.g., having a disrupted RuvC/HNH linker region; having a deletion within the HNH domain that reduces the HNH cleavage activity; having an insertion within the HNH domain of a heterologous amino acid sequence; etc.) and (ii) a non-Cas9 polypeptide (where the non-Cas9 polypeptide can be referred to as a fusion partner). For example, a subject variant Cas9 protein can be a chimeric variant Cas9 protein that includes a variant Cas9 protein (e.g., having a disrupted RuvC/HNH linker region; having a deletion within the HNH domain that reduces the HNH cleavage activity; having an insertion within the HNH domain of a heterologous amino acid sequence; etc.) fused to a non-Cas9 polypeptide (where the non-Cas9 polypeptide can be referred to as a fusion partner). In some cases, a subject variant Cas9 protein can be a chimeric variant Cas9 protein that includes (a) a variant Cas9 protein (e.g., having a disrupted RuvC/HNH linker region; having a deletion within the HNH domain that reduces the HNH cleavage activity; having an insertion within the HNH domain of a heterologous amino acid sequence; etc.; etc.) fused to (b) a portion of a another Cas9 protein (e.g., a domain or region of a Cas9 protein that is different from the Cas9 protein of portion (a), e.g., the Cas9 protein of portion (a) can be from a different species than the Cas9 protein of portion (b)).

[0028] As used herein, the term “exogenous nucleic acid” refers to a nucleic acid that is not normally or naturally found in and/or produced by a given bacterium, organism, or cell in nature. As used herein, the term “endogenous nucleic acid” refers to a nucleic acid that is normally found in and/or produced by a given bacterium, organism, or cell in nature. An “endogenous nucleic acid” is also referred to as a “native nucleic acid” or a nucleic acid that is “native” to a given bacterium, organism, or cell.

[0029] “Recombinant,” as used herein, means that a particular nucleic acid (DNA or RNA) or protein is the product of various combinations of cloning, restriction, and/or ligation steps resulting in a construct having a structural coding or non-coding sequence distinguishable from endogenous nucleic acids found in natural systems. Generally, DNA sequences encoding the structural coding sequence can be assembled from cDNA fragments and short oligonucleotide linkers, or from a series of synthetic oligonucleotides, to provide a synthetic nucleic acid which is capable of being expressed from a recombinant transcriptional unit contained in a cell or in a cell-free transcription and translation system. Such sequences can be provided in the form of an open reading frame uninterrupted by internal non-translated sequences, or introns, which are typically present in eukaryotic genes. Genomic DNA comprising the relevant sequences can also be used in the formation of a recombinant gene or transcriptional unit. Sequences of non-translated DNA may be present 5′ or 3′ from the open reading frame, where such sequences do not interfere with manipulation or expression of the coding regions, and may indeed act to modulate production of a desired product by various mechanisms (see “DNA regulatory sequences”, below).

[0030] Thus, e.g., the term “recombinant” polynucleotide or “recombinant” nucleic acid refers to one which is not naturally occurring, e.g., is made by the artificial combination of two otherwise separated segments of sequence through human intervention. This artificial combination is often accomplished by either chemical synthesis means, or by the artificial manipulation of isolated segments of nucleic acids, e.g., by genetic engineering techniques. Such is usually done to replace a codon with a redundant codon encoding the same or a conservative amino acid, while typically introducing or removing a sequence recognition site. Alternatively, it is performed to join together nucleic acid segments of desired functions to generate a desired combination of functions. This artificial combination is often accomplished by either chemical synthesis means, or by the artificial manipulation of isolated segments of nucleic acids, e.g., by genetic engineering techniques.

[0031] Similarly, the term “recombinant” polypeptide refers to a polypeptide which is not naturally occurring, e.g., is made by the artificial combination of two otherwise separated segments of amino sequence through human intervention. Thus, e.g., a polypeptide that comprises a heterologous amino acid sequence is recombinant.

[0032] By “construct” or “vector” is meant a recombinant nucleic acid, generally recombinant DNA, which has been generated for the purpose of the expression and/or propagation of a nucleotide sequence(s) of interest, or is to be used in the construction of other recombinant nucleotide sequences.

[0033] The term “transformation” is used interchangeably herein with “genetic modification” and refers to a permanent or transient genetic change induced in a cell following introduction of a nucleic acid (i.e., DNA and/or RNA exogenous to the cell). Genetic change (“modification”) can be accomplished either by incorporation of the new DNA into the genome of the host cell, or by transient or stable maintenance of the new DNA as an episomal element. Where the cell is a eukaryotic cell, a permanent genetic change is generally achieved by introduction of the DNA into the genome of the cell. In prokaryotic cells, permanent changes can be introduced into the chromosome or via extrachromosomal elements such as plasmids and expression vectors, which may contain one or more selectable markers to aid in their maintenance in the recombinant host cell. Suitable methods of genetic modification include viral infection, transfection, conjugation, protoplast fusion, electroporation, particle gun technology, calcium phosphate precipitation, direct microinjection, and the like. The choice of method is generally dependent on the type of cell being transformed and the circumstances under which the transformation is taking place (i.e. in vitro, ex vivo, or in vivo). A general discussion of these methods can be found in Ausubel, et al, Short Protocols in Molecular Biology, 3rd ed., Wiley & Sons, 1995.

[0034] The terms “DNA regulatory sequences,” “control elements,” and “regulatory elements,” used interchangeably herein, refer to transcriptional and translational control sequences, such as promoters, enhancers, polyadenylation signals, terminators, protein degradation signals, and the like, that provide for and/or regulate expression of a coding sequence and/or production of an encoded polypeptide in a host cell. As used herein, a “promoter sequence” or “promoter” is a DNA regulatory region capable of binding/recruiting RNA polymerase (e.g., via a transcription initiation complex) and initiating transcription of a downstream (3′ direction) sequence (e.g., a protein coding (“coding”) or non protein-coding (“non-coding”) sequence. A promoter can be a constitutively active promoter (e.g., a promoter that is constitutively in an active/“ON” state), it may be an inducible promoter (e.g., a promoter whose state, active/“ON” or inactive/“OFF”, is controlled by an external stimulus, e.g., the presence of a particular temperature, compound, or protein), it may be a spatially restricted promoter (e.g., tissue specific promoter, cell type specific promoter, etc.), and/or it may be a temporally restricted promoter (e.g., the promoter is in the “ON” state or “OFF” state during specific stages of embryonic development or during specific stages of a biological process, e.g., hair follicle cycle in mice).

[0035] “Operably linked” refers to a juxtaposition wherein the components so described are in a relationship permitting them to function in their intended manner. For instance, a promoter is operably linked to a nucleotide sequence (e.g., a protein coding sequence, e.g., a sequence encoding an mRNA; a non protein coding sequence, e.g., a sequence encoding a non-coding RNA (ncRNA) such as a Cas9 guide RNA, a targeter RNA, an activator RNA; and the like) if the promoter affects its transcription and/or expression. As used herein, the terms “heterologous promoter” and “heterologous control regions” refer to promoters and other control regions that are not normally associated with a particular nucleic acid in nature. For example, a “transcriptional control region heterologous to a coding region” is a transcriptional control region that is not normally associated with the coding region in nature.

[0036] A “host cell,” as used herein, denotes an in vivo or in vitro eukaryotic cell, a prokaryotic cell, or a cell from a multicellular organism (e.g., a cell line) cultured as a unicellular entity, which eukaryotic or prokaryotic cells can be, or have been, used as recipients for a nucleic acid (e.g., an expression vector that comprises a nucleotide sequence of interest), and include the progeny of the original cell which has been genetically modified by the nucleic acid. It is understood that the progeny of a single cell may not necessarily be completely identical in morphology or in genomic or total DNA complement as the original parent, due to natural, accidental, or deliberate mutation. A “recombinant host cell” (also referred to as a “genetically modified host cell”) is a host cell into which has been introduced a heterologous nucleic acid, e.g., an expression vector. For example, a subject prokaryotic host cell is a genetically modified prokaryotic host cell (e.g., a bacterium), by virtue of introduction into a suitable prokaryotic host cell of a heterologous nucleic acid, e.g., an exogenous nucleic acid that is foreign to (not normally found in nature in) the prokaryotic host cell, or a recombinant nucleic acid that is not normally found in the prokaryotic host cell; and a subject eukaryotic host cell is a genetically modified eukaryotic host cell, by virtue of introduction into a suitable eukaryotic host cell of a heterologous nucleic acid, e.g., an exogenous nucleic acid that is foreign to the eukaryotic host cell, or a recombinant nucleic acid that is not normally found in the eukaryotic host cell.

[0037] The term “conservative amino acid substitution” refers to the interchangeability in proteins of amino acid residues having similar side chains. For example, a group of amino acids having aliphatic side chains consists of glycine, alanine, valine, leucine, and isoleucine; a group of amino acids having aliphatic-hydroxyl side chains consists of serine and threonine; a group of amino acids having amide-containing side chains consists of asparagine and glutamine; a group of amino acids having aromatic side chains consists of phenylalanine, tyrosine, and tryptophan; a group of amino acids having basic side chains consists of lysine, arginine, and histidine; and a group of amino acids having sulfur-containing side chains consists of cysteine and methionine. Exemplary conservative amino acid substitution groups are: valine-leucine-isoleucine, phenylalanine-tyrosine, lysine-arginine, alanine-valine, and asparagine-glutamine.

[0038] A polynucleotide or polypeptide has a certain percent “sequence identity” to another polynucleotide or polypeptide, meaning that, when aligned, that percentage of bases or amino acids are the same, and in the same relative position, when comparing the two sequences. Sequence similarity can be determined in a number of different manners. To determine sequence identity, sequences can be aligned using the methods and computer programs, including BLAST, available over the world wide web at ncbi.nlm.nih.gov/BLAST. See, e.g., Altschul et al. (1990), J. Mol. Biol. 215:403-10. Another alignment algorithm is FASTA, available in the Genetics Computing Group (GCG) package, from Madison, Wis., USA, a wholly owned subsidiary of Oxford Molecular Group, Inc. Other techniques for alignment are described in Methods in Enzymology, vol. 266: Computer Methods for Macromolecular Sequence Analysis (1996), ed. Doolittle, Academic Press, Inc., a division of Harcourt Brace & Co., San Diego, Calif., USA. Of particular interest are alignment programs that permit gaps in the sequence. The Smith-Waterman is one type of algorithm that permits gaps in sequence alignments. See Meth. Mol. Biol. 70: 173-187 (1997). Also, the GAP program using the Needleman and Wunsch alignment method can be utilized to align sequences. See J. Mol. Biol. 48: 443-453 (1970).

[0039] “Binding” as used herein (e.g. with reference to binding between an RNA and a protein, e.g., via an RNA-binding domain of a polypeptide) refers to a non-covalent interaction between macromolecules (e.g., between a protein and a nucleic acid). While in a state of non-covalent interaction, the macromolecules are said to be “associated” or “interacting” or “binding” (e.g., when a molecule X is said to interact with a molecule Y, it is meant the molecule X binds to molecule Y in a non-covalent manner). Not all components of a binding interaction need be sequence-specific (e.g., contacts with phosphate residues in a DNA backbone), but some portions of a binding interaction may be sequence-specific. Binding interactions are generally characterized by a dissociation constant (Kd) of less than 10⁻⁶ M, less than 10⁻⁷ M, less than 10⁻⁸ M, less than 10⁻⁹ M, less than 10⁻¹⁰ M, less than 10⁻¹¹ M, less than 10⁻¹² M, less than 10⁻¹³ M, less than 10⁻¹⁴ M, or less than 10⁻¹⁵ M. “Affinity” refers to the strength of binding, increased binding affinity being correlated with a lower Kd.

[0040] By “binding domain” it is meant a protein domain that is able to bind non-covalently to another molecule. A binding domain can bind to, for example, a DNA molecule (a DNA-binding protein), an RNA molecule (an RNA-binding protein) and/or a protein molecule (a protein-binding protein). In the case of a protein domain-binding protein, it can bind to itself (to form homodimers, homotrimers, etc.) and/or it can bind to one or more molecules of a different protein or proteins.

[0041] Before the present invention is further described, it is to be understood that this invention is not limited to particular embodiments described, as such may, of course, vary. It is also to be understood that the terminology used herein is for the purpose of describing particular embodiments only, and is not intended to be limiting, since the scope of the present invention will be limited only by the appended claims.

[0042] Where a range of values is provided, it is understood that each intervening value, to the tenth of the unit of the lower limit unless the context clearly dictates otherwise, between the upper and lower limit of that range and any other stated or intervening value in that stated range, is encompassed within the invention. The upper and lower limits of these smaller ranges may independently be included in the smaller ranges, and are also encompassed within the invention, subject to any specifically excluded limit in the stated range. Where the stated range includes one or both of the limits, ranges excluding either or both of those included limits are also included in the invention.

[0043] Unless defined otherwise, all technical and scientific terms used herein have the same meaning as commonly understood by one of ordinary skill in the art to which this invention belongs. Although any methods and materials similar or equivalent to those described herein can also be used in the practice or testing of the present invention, the preferred methods and materials are now described. All publications mentioned herein are incorporated herein by reference to disclose and describe the methods and/or materials in connection with which the publications are cited.

[0044] It must be noted that as used herein and in the appended claims, the singular forms “a,” “an,” and “the” include plural referents unless the context clearly dictates otherwise. Thus, for example, reference to “a protein” includes a plurality of such proteins and reference to “the nucleic acid” includes reference to one or more nucleic acids and equivalents thereof known to those skilled in the art, and so forth. It is further noted that the claims may be drafted to exclude any optional element. As such, this statement is intended to serve as antecedent basis for use of such exclusive terminology as “solely,” “only” and the like in connection with the recitation of claim elements, or use of a “negative” limitation.

[0045] It is appreciated that certain features of the invention, which are, for clarity, described in the context of separate embodiments, may also be provided in combination in a single embodiment. Conversely, various features of the invention, which are, for brevity, described in the context of a single embodiment, may also be provided separately or in any suitable sub-combination. All combinations of the embodiments pertaining to the invention are specifically embraced by the present invention and are disclosed herein just as if each and every combination was individually and explicitly disclosed. In addition, all sub-combinations of the various embodiments and elements thereof are also specifically embraced by the present invention and are disclosed herein just as if each and every such sub-combination was individually and explicitly disclosed herein.

[0046] The publications discussed herein are provided solely for their disclosure prior to the filing date of the present application. Nothing herein is to be construed as an admission that the present invention is not entitled to antedate such publication by virtue of prior invention. Further, the dates of publication provided may be different from the actual publication dates which may need to be independently confirmed.

### DETAILED DESCRIPTION

[0047] The present disclosure provides variant Cas9 proteins, nucleic acids encoding the variant Cas9 proteins, and host cells comprising the nucleic acids. The present disclosure provides systems that include a subject variant Cas9 protein (and/or a nucleic acid encoding the variant Cas9 protein) and a Cas9 guide RNA. In some cases, a subject system includes a PAMmer and/or a donor polynucleotide. The variant Cas9 proteins and the nucleic acids encoding the variant Cas9 proteins are useful in a wide variety of methods, which are also provided.

### Compositions

[0048] A subject composition includes a subject variant Cas9 protein and/or a nucleic acid encoding a subject variant Cas9 protein. A subject composition can also include one or more of: a Cas9 guide RNA, a PAMmer, and a donor polynucleotide. For example, in some cases, a subject composition includes a Cas9 guide RNA. In some cases, a subject composition includes a PAMmer. In some cases, a subject composition includes a donor polynucleotide. In some cases, a subject composition includes a PAMmer and a Cas9 guide RNA. In some cases, a subject composition includes a PAMmer and a donor polynucleotide. In some cases, a subject composition includes a Cas9 guide RNA and a donor polynucleotide. In some cases, a subject composition includes a Cas9 guide RNA, a PAMmer, and a donor polynucleotide.

### Cas9 Proteins

[0049] This disclosure provides reporter Cas9 proteins, which are described in detail below. A Cas9 protein forms a complex with a Cas9 guide RNA. The guide RNA provides target specificity to the complex by having a nucleotide sequence (a guide sequence) that is complementary to a sequence (the target site) of a target nucleic acid (as noted above). The Cas9 protein of the complex provides the site-specific activity. In other words, the Cas9 protein is guided to a target site (e.g., stabilized at a target site) within a target nucleic acid sequence (e.g. a chromosomal sequence or an extrachromosomal sequence, e.g. an episomal sequence, a minicircle sequence, a mitochondrial sequence, a chloroplast sequence, etc.) by virtue of its association with the protein-binding segment of the Cas9 guide RNA.

[0050] A Cas9 protein can bind and/or modify (e.g., cleave, nick, methylate, demethylate, etc.) a target nucleic acid and/or a polypeptide associated with target nucleic acid (e.g., methylation or acetylation of a histone tail)(e.g., when the Cas9 protein includes a fusion partner with an activity). In some cases, the Cas9 protein is a naturally-occurring protein (e.g, naturally occurs in bacterial and/or archaeal cells). In other cases, the Cas9 protein is not a naturally-occurring polypeptide (e.g., the Cas9 protein is a variant Cas9 protein, a chimeric protein, and the like).

[0051] Examples of suitable Cas9 proteins include, but are not limited to, those set forth in SEQ ID NOs: 1-259, and 795-1346. Naturally occurring Cas9 proteins bind a Cas9 guide RNA, are thereby directed to a specific sequence within a target nucleic acid (a target site), and cleave the target nucleic acid (e.g., cleave dsDNA to generate a double strand break, cleave ssDNA, cleave ssRNA, etc.). A chimeric Cas9 protein (a Cas9 fusion protein) is a fusion protein that is fused to a heterologous protein. The fusion partner can provide an activity, e.g., enzymatic activity (e.g., nuclease activity, activity for DNA and/or RNA methylation, activity for DNA and/or RNA cleavage, activity for histone acetylation, activity for histone methylation, activity for RNA modification, activity for RNA-binding, activity for RNA splicing etc.). In some cases a portion of the Cas9 protein (e.g., the RuvC domain and/or the HNH domain) exhibits reduced nuclease activity relative to the corresponding portion of a wild type Cas9 protein (e.g., in some cases the Cas9 protein is a nickase). In some cases, the Cas9 protein is enzymatically inactive.

[0052] Assays to determine whether given protein interacts with a Cas9 guide RNA can be any convenient binding assay that tests for binding between a protein and a nucleic acid. Suitable binding assays (e.g., gel shift assays) will be know to one of ordinary skill in the art (e.g., assays that include adding a Cas9 guide RNA and a protein to a target nucleic acid). In some cases, a PAMmer is also added (e.g., in some cases when the target nucleic acid is a single stranded nucleic acid).

[0053] Assays to determine whether a protein has an activity (e.g., to determine if the protein has nuclease activity that cleaves a target nucleic acid and/or some heterologous activity) can be any convenient assay (e.g., any convenient nucleic acid cleavage assay that tests for nucleic acid cleavage). Suitable assays (e.g., cleavage assays) will be known to one of ordinary skill in the art and can include adding a Cas9 guide RNA and a protein to a target nucleic acid. In some cases, a PAMmer is also added (e.g., in some cases when the target nucleic acid is a single stranded nucleic acid).

[0054] In some cases, a Cas9 protein (e.g., a chimeric Cas9 protein) has enzymatic activity that modifies target nucleic acid (e.g., nuclease activity, methyltransferase activity, demethylase activity, DNA repair activity, DNA damage activity, deamination activity, dismutase activity, alkylation activity, depurination activity, oxidation activity, pyrimidine dimer forming activity, integrase activity, transposase activity, recombinase activity, polymerase activity, ligase activity, helicase activity, photolyase activity or glycosylase activity).

[0055] In other cases, a Cas9 protein (e.g., a chimeric Cas9 protein) has enzymatic activity that modifies a polypeptide (e.g., a histone) associated with target nucleic acid (e.g., methyltransferase activity, demethylase activity, acetyltransferase activity, deacetylase activity, kinase activity, phosphatase activity, ubiquitin ligase activity, deubiquitinating activity, adenylation activity, deadenylation activity, SUMOylating activity, deSUMOylating activity, ribosylation activity, deribosylation activity, myristoylation activity or demyristoylation activity).

[0056] Many Cas9 orthologs from a wide variety of species have been identified and the proteins share only a few identical amino acids. Identified Cas9 orthologs have similar domain architecture with a central HNH endonuclease domain and a split RuvC/RNaseH domain (e.g., RuvCI, RuvCII, and RuvCIII). Cas9 proteins share 4 key motifs with a conserved architecture. Motifs 1, 2, and 4 are RuvC like motifs while motif 3 is an HNH-motif. In some cases, a suitable Cas9 protein comprises an amino acid sequence having 4 motifs, each of motifs 1-4 having 60% or more, 70% or more, 75% or more, 80% or more, 85% or more, 90% or more, 95% or more, 99% or more or 100% amino acid sequence identity to motifs 1-4 of the Cas9 amino acid sequence set forth as SEQ ID NO:8 (the motifs are in Table 1, below, and are set forth as SEQ ID NOs: 260-263, respectively), or to the corresponding portions in any of the amino acid sequences set forth in SEQ ID NOs:1-256 and 795-1346.

[0057] In some cases, a suitable Cas9 protein comprises an amino acid sequence having 4 motifs, each of motifs 1-4 having 60% or more amino acid sequence identity to motifs 1-4 of the Cas9 amino acid sequence set forth as SEQ ID NO:8 (the motifs are in Table 1, below, and are set forth as SEQ ID NOs: 260-263, respectively), or to the corresponding portions in any of the amino acid sequences set forth in SEQ ID NOs:1-256 and 795-1346.

[0058] In some cases, a suitable Cas9 protein comprises an amino acid sequence having 4 motifs, each of motifs 1-4 having 70% or more amino acid sequence identity to motifs 1-4 of the Cas9 amino acid sequence set forth as SEQ ID NO:8 (the motifs are in Table 1, below, and are set forth as SEQ ID NOs: 260-263, respectively), or to the corresponding portions in any of the amino acid sequences set forth in SEQ ID NOs:1-256 and 795-1346.

[0059] In some cases, a suitable Cas9 protein comprises an amino acid sequence having 4 motifs, each of motifs 1-4 having 75% or more amino acid sequence identity to motifs 1-4 of the Cas9 amino acid sequence set forth as SEQ ID NO:8 (the motifs are in Table 1, below, and are set forth as SEQ ID NOs: 260-263, respectively), or to the corresponding portions in any of the amino acid sequences set forth in SEQ ID NOs:1-256 and 795-1346.

[0060] In some cases, a suitable Cas9 protein comprises an amino acid sequence having 4 motifs, each of motifs 1-4 having 80% or more amino acid sequence identity to motifs 1-4 of the Cas9 amino acid sequence set forth as SEQ ID NO:8 (the motifs are in Table 1, below, and are set forth as SEQ ID NOs: 260-263, respectively), or to the corresponding portions in any of the amino acid sequences set forth in SEQ ID NOs:1-256 and 795-1346.

[0061] In some cases, a suitable Cas9 protein comprises an amino acid sequence having 4 motifs, each of motifs 1-4 having 85% or more amino acid sequence identity to motifs 1-4 of the Cas9 amino acid sequence set forth as SEQ ID NO:8 (the motifs are in Table 1, below, and are set forth as SEQ ID NOs: 260-263, respectively), or to the corresponding portions in any of the amino acid sequences set forth in SEQ ID NOs:1-256 and 795-1346.

[0062] In some cases, a suitable Cas9 protein comprises an amino acid sequence having 4 motifs, each of motifs 1-4 having 90% or more amino acid sequence identity to motifs 1-4 of the Cas9 amino acid sequence set forth as SEQ ID NO:8 (the motifs are in Table 1, below, and are set forth as SEQ ID NOs: 260-263, respectively), or to the corresponding portions in any of the amino acid sequences set forth in SEQ ID NOs:1-256 and 795-1346.

[0063] In some cases, a suitable Cas9 protein comprises an amino acid sequence having 4 motifs, each of motifs 1-4 having 95% or more amino acid sequence identity to motifs 1-4 of the Cas9 amino acid sequence set forth as SEQ ID NO:8 (the motifs are in Table 1, below, and are set forth as SEQ ID NOs: 260-263, respectively), or to the corresponding portions in any of the amino acid sequences set forth in SEQ ID NOs:1-256 and 795-1346.

[0064] In some cases, a suitable Cas9 protein comprises an amino acid sequence having 4 motifs, each of motifs 1-4 having 99% or more amino acid sequence identity to motifs 1-4 of the Cas9 amino acid sequence set forth as SEQ ID NO:8 (the motifs are in Table 1, below, and are set forth as SEQ ID NOs: 260-263, respectively), or to the corresponding portions in any of the amino acid sequences set forth in SEQ ID NOs:1-256 and 795-1346.

[0065] In some cases, a suitable Cas9 protein comprises an amino acid sequence having 4 motifs, each of motifs 1-4 having 100% amino acid sequence identity to motifs 1-4 of the Cas9 amino acid sequence set forth as SEQ ID NO:8 (the motifs are in Table 1, below, and are set forth as SEQ ID NOs: 260-263, respectively), or to the corresponding portions in any of the amino acid sequences set forth in SEQ ID NOs:1-256 and 795-1346.

[0066] In some cases, a suitable Cas9 protein comprises an amino acid sequence having 60% or more, 70% or more, 75% or more, 80% or more, 85% or more, 90% or more, 95% or more, 99% or more or 100% amino acid sequence identity to amino acids 7-166 or 731-1003 of the Cas9 amino acid sequence set forth in SEQ ID NO: 8, or to the corresponding portions in any of the amino acid sequences set forth as SEQ ID NOs:1-256 and 795-1346. Any Cas9 protein can be used as part of a chimeric Cas9 protein of the subject methods.

[0067] In some cases, a suitable Cas9 protein comprises an amino acid sequence having 60% or more amino acid sequence identity to amino acids 7-166 or 731-1003 of the Cas9 amino acid sequence set forth in SEQ ID NO: 8, or to the corresponding portions in any of the amino acid sequences set forth as SEQ ID NOs:1-256 and 795-1346. Any Cas9 protein can be used as part of a chimeric Cas9 protein of the subject methods.

[0068] In some cases, a suitable Cas9 protein comprises an amino acid sequence having 70% or more amino acid sequence identity to amino acids 7-166 or 731-1003 of the Cas9 amino acid sequence set forth in SEQ ID NO: 8, or to the corresponding portions in any of the amino acid sequences set forth as SEQ ID NOs:1-256 and 795-1346. Any Cas9 protein can be used as part of a chimeric Cas9 protein of the subject methods.

[0069] In some cases, a suitable Cas9 protein comprises an amino acid sequence having 75% or more amino acid sequence identity to amino acids 7-166 or 731-1003 of the Cas9 amino acid sequence set forth in SEQ ID NO: 8, or to the corresponding portions in any of the amino acid sequences set forth as SEQ ID NOs:1-256 and 795-1346. Any Cas9 protein can be used as part of a chimeric Cas9 protein of the subject methods.

[0070] In some cases, a suitable Cas9 protein comprises an amino acid sequence having 80% or more amino acid sequence identity to amino acids 7-166 or 731-1003 of the Cas9 amino acid sequence set forth in SEQ ID NO: 8, or to the corresponding portions in any of the amino acid sequences set forth as SEQ ID NOs:1-256 and 795-1346. Any Cas9 protein can be used as part of a chimeric Cas9 protein of the subject methods.

[0071] In some cases, a suitable Cas9 protein comprises an amino acid sequence having 85% or more amino acid sequence identity to amino acids 7-166 or 731-1003 of the Cas9 amino acid sequence set forth in SEQ ID NO: 8, or to the corresponding portions in any of the amino acid sequences set forth as SEQ ID NOs:1-256 and 795-1346. Any Cas9 protein can be used as part of a chimeric Cas9 protein of the subject methods.

[0072] In some cases, a suitable Cas9 protein comprises an amino acid sequence having 90% or more amino acid sequence identity to amino acids 7-166 or 731-1003 of the Cas9 amino acid sequence set forth in SEQ ID NO: 8, or to the corresponding portions in any of the amino acid sequences set forth as SEQ ID NOs:1-256 and 795-1346. Any Cas9 protein can be used as part of a chimeric Cas9 protein of the subject methods.

[0073] In some cases, a suitable Cas9 protein comprises an amino acid sequence having 95% or more amino acid sequence identity to amino acids 7-166 or 731-1003 of the Cas9 amino acid sequence set forth in SEQ ID NO: 8, or to the corresponding portions in any of the amino acid sequences set forth as SEQ ID NOs:1-256 and 795-1346. Any Cas9 protein can be used as part of a chimeric Cas9 protein of the subject methods.

[0074] In some cases, a suitable Cas9 protein comprises an amino acid sequence having 99% or more amino acid sequence identity to amino acids 7-166 or 731-1003 of the Cas9 amino acid sequence set forth in SEQ ID NO: 8, or to the corresponding portions in any of the amino acid sequences set forth as SEQ ID NOs:1-256 and 795-1346. Any Cas9 protein can be used as part of a chimeric Cas9 protein of the subject methods.

[0075] In some cases, a suitable Cas9 protein comprises an amino acid sequence having 100% amino acid sequence identity to amino acids 7-166 or 731-1003 of the Cas9 amino acid sequence set forth in SEQ ID NO: 8, or to the corresponding portions in any of the amino acid sequences set forth as SEQ ID NOs:1-256 and 795-1346. Any Cas9 protein can be used as part of a chimeric Cas9 protein of the subject methods.

[0076] In some cases, a suitable Cas9 protein comprises an amino acid sequence having 60% or more, 70% or more, 75% or more, 80% or more, 85% or more, 90% or more, 95% or more, 99% or more or 100% amino acid sequence identity to the Cas9 amino acid sequence set forth in SEQ ID NO: 8, or to any of the amino acid sequences set forth as SEQ ID NOs:1-256 and 795-1346. Any Cas9 protein can be used as part of a chimeric Cas9 protein of the subject methods.

[0077] In some cases, a suitable Cas9 protein comprises an amino acid sequence having 60% or more amino acid sequence identity to the Cas9 amino acid sequence set forth in SEQ ID NO: 8, or to any of the amino acid sequences set forth as SEQ ID NOs:1-256 and 795-1346. Any Cas9 protein can be used as part of a chimeric Cas9 protein for use in a subject method.

[0078] In some cases, a suitable Cas9 protein comprises an amino acid sequence having 70% or more amino acid sequence identity to the Cas9 amino acid sequence set forth in SEQ ID NO: 8, or to any of the amino acid sequences set forth as SEQ ID NOs:1-256 and 795-1346. Any Cas9 protein can be used as part of a chimeric Cas9 protein of the subject methods.

[0079] In some cases, a suitable Cas9 protein comprises an amino acid sequence having 75% or more amino acid sequence identity to the Cas9 amino acid sequence set forth in SEQ ID NO: 8, or to any of the amino acid sequences set forth as SEQ ID NOs:1-256 and 795-1346. Any Cas9 protein can be used as part of a chimeric Cas9 protein of the subject methods.

[0080] In some cases, a suitable Cas9 protein comprises an amino acid sequence having 80% or more amino acid sequence identity to the Cas9 amino acid sequence set forth in SEQ ID NO: 8, or to any of the amino acid sequences set forth as SEQ ID NOs:1-256 and 795-1346. Any Cas9 protein can be used as part of a chimeric Cas9 protein of the subject methods.

[0081] In some cases, a suitable Cas9 protein comprises an amino acid sequence having 85% or more amino acid sequence identity to the Cas9 amino acid sequence set forth in SEQ ID NO: 8, or to any of the amino acid sequences set forth as SEQ ID NOs:1-256 and 795-1346. Any Cas9 protein can be used as part of a chimeric Cas9 protein of the subject methods.

[0082] In some cases, a suitable Cas9 protein comprises an amino acid sequence having 90% or more amino acid sequence identity to the Cas9 amino acid sequence set forth in SEQ ID NO: 8, or to any of the amino acid sequences set forth as SEQ ID NOs:1-256 and 795-1346. Any Cas9 protein can be used as part of a chimeric Cas9 protein of the subject methods.

[0083] In some cases, a suitable Cas9 protein comprises an amino acid sequence having 95% or more amino acid sequence identity to the Cas9 amino acid sequence set forth in SEQ ID NO: 8, or to any of the amino acid sequences set forth as SEQ ID NOs:1-256 and 795-1346. Any Cas9 protein can be used as part of a chimeric Cas9 protein of the subject methods.

[0084] In some cases, a suitable Cas9 protein comprises an amino acid sequence having 99% or more amino acid sequence identity to the Cas9 amino acid sequence set forth in SEQ ID NO: 8, or to any of the amino acid sequences set forth as SEQ ID NOs:1-256 and 795-1346. Any Cas9 protein can be used as part of a chimeric Cas9 protein of the subject methods.

[0085] In some cases, a suitable Cas9 protein comprises an amino acid sequence having 100% amino acid sequence identity to the Cas9 amino acid sequence set forth in SEQ ID NO: 8, or to any of the amino acid sequences set forth as SEQ ID NOs:1-256 and 795-1346. Any Cas9 protein can be used as part of a chimeric Cas9 protein of the subject methods.

[0086] In some cases, a Cas9 protein comprises 4 motifs (as listed in Table 1), at least one with (or each with) amino acid sequences having 75% or more, 80% or more, 85% or more, 90% or more, 95% or more, 99% or more or 100% amino acid sequence identity to each of the 4 motifs listed in Table 1 (SEQ ID NOs:260-263), or to the corresponding portions in any of the amino acid sequences set forth as SEQ ID NOs:1-256 and 795-1346.

[0087] As used herein, the term “Cas9 protein” encompasses the term “variant Cas9 protein”; and the term “variant Cas9 protein” encompasses the term “chimeric Cas9 protein” (or “Cas9 fusion protein”).

### Variant Cas9 Proteins

[0088] The present disclosure provides compositions and methods that include a variant Cas9 protein. A variant Cas9 protein has an amino acid sequence that is different by one amino acid (e.g., has a deletion, insertion, substitution, fusion) (i.e., different by at least one amino acid) when compared to the amino acid sequence of a wild type Cas9 protein. In some instances, the variant Cas9 protein has an amino acid change (e.g., deletion, insertion, or substitution) that reduces the nuclease activity of the Cas9 protein. For example, in some instances, the variant Cas9 protein has 50% or less, 40% or less, 30% or less, 20% or less, 10% or less, 5% or less, or 1% or less of the nuclease activity of the corresponding wild-type Cas9 protein. In some cases, the variant Cas9 protein has no substantial nuclease activity. When a Cas9 protein is a variant Cas9 protein that has no substantial nuclease activity, it can be referred to as “dCas9.”

[0089] In some cases, a variant Cas9 protein can cleave the complementary strand of a target nucleic acid but has reduced ability to cleave the non-complementary strand of a target nucleic acid (e.g., a PAMmer can be considered to be the non-complementary strand in cases where the target is a single stranded target). For example, the variant Cas9 protein can have a mutation (amino acid substitution) that reduces the function of the RuvC domain. As a non-limiting example, in some embodiments, a variant Cas9 protein has a mutation at residue D10 (e.g., D10A, aspartate to alanine) of SEQ ID NO:8 or of SEQ ID NO: 1545 (or the corresponding position of any of the proteins set forth in SEQ ID NOs:1-256 and 795-1346) and can therefore cleave the complementary strand of a double stranded target nucleic acid but has reduced ability to cleave the non-complementary strand of a double stranded target nucleic acid (thus resulting in a single strand break (SSB) instead of a double strand break (DSB) when the variant Cas9 protein cleaves a double stranded target nucleic acid) (see, for example, Jinek et al., Science. 2012 Aug. 17; 337(6096):816-21). A Cas9 protein that cleaves one strand but not the other of a double stranded target nucleic acid is referred to herein as a “nickase” or a “nickase Cas9.”

[0090] In some cases, a variant Cas9 protein can cleave the non-complementary strand of a target nucleic acid (e.g., a PAMmer can be considered to be the non-complementary strand in cases where the target is a single stranded target) but has reduced ability to cleave the complementary strand of the target nucleic acid. For example, the variant Cas9 protein can have a mutation (amino acid substitution) that reduces the function of the HNH domain Thus, the Cas9 protein can be a nickase that cleaves the non-complementary strand (e.g., a subject quenched PAMmer), but does not cleave the complementary strand (e.g., does not cleave a single stranded target nucleic acid). As a non-limiting example, in some embodiments, the variant Cas9 protein has a mutation at position H840 (e.g., an H840A mutation, histidine to alanine) of SEQ ID NO: 8 or at the corresponding position H839 (e.g., H839A) of SEQ ID NO: 1545 (or the corresponding position of any of the proteins set forth as SEQ ID NOs:1-256 and 795-1346) and can therefore cleave the non-complementary strand of the target nucleic acid (e.g., the quenched PAMmer) but has reduced ability to cleave (e.g., does not cleave) the complementary strand of the target nucleic acid. Such a Cas9 protein has a reduced ability to cleave a target nucleic acid (e.g., a single stranded target nucleic acid) but retains the ability to bind a target nucleic acid (e.g., a single stranded target nucleic acid) and can cleave a bound quenched PAMmer.

[0091] In some cases, a variant Cas9 protein has a reduced ability to cleave both the complementary and the non-complementary strands of a double stranded target nucleic acid. As a non-limiting example, in some cases, the variant Cas9 protein harbors mutations at residues D10 and H840 (e.g., D10A and H840A) of SEQ ID NO: 8 or D10 and H839 of SEQ ID NO: 1545 (or the corresponding residues of any of the proteins set forth as SEQ ID NOs:1-256 and 795-1346) such that the polypeptide has a reduced ability to cleave (e.g., does not cleave) both the complementary and the non-complementary strands of a target nucleic acid. Such a Cas9 protein has a reduced ability to cleave a target nucleic acid (e.g., a single stranded or double stranded target nucleic acid) but retains the ability to bind a target nucleic acid. A Cas9 protein that cannot cleave target nucleic acid (e.g., due to one or more mutations, e.g., in the catalytic domains of the RuvC and HNH domains) is referred to as a “dead” Cas9 or simply “dCas9.”

[0092] Other residues can be mutated to achieve the above effects (i.e. inactivate one or the other nuclease portions). As non-limiting examples, residues D10, G12, G17, E762, H840, N854, N863, H982, H983, A984, D986, and/or A987 of SEQ ID NO: 8 (or the corresponding mutations of any of the proteins set forth as SEQ ID NOs:1-256, 795-1346, and 1545) can be altered (i.e., substituted). Also, mutations other than alanine substitutions are suitable.

[0093] In some embodiments, a variant Cas9 protein that has reduced catalytic activity (e.g., when a Cas9 protein has a D10, G12, G17, E762, H840, N854, N863, H982, H983, A984, D986, and/or a A987 mutation of SEQ ID NO: 8 or the corresponding mutations of any of the proteins set forth as SEQ ID NOs:1-256, 795-1346, and 1545, e.g., D10A, G12A, G17A, E762A, H840A, N854A, N863A, H982A, H983A, A984A, and/or D986A), the variant Cas9 protein can still bind to target nucleic acid in a site-specific manner (because it is still guided to a target nucleic acid sequence by a Cas9 guide RNA) as long as it retains the ability to interact with the Cas9 guide RNA.

TABLE 1
Table 1 lists 4 motifs that are present in Cas9 sequences
from various species. The amino acids listed in Table 1
are from the Cas9 from S. pyogenes (SEQ ID NO: 8).

| Motif # | Motif | Amino acids (residue #s) | Highly conserved |
|---|---|---|---|
| 1 | RuvC-like I | IGLDIGTNSVGWAVI (7-21) | D10, G12, G17 |
| | | (SEQ ID NO: 260) | |
| 2 | RuvC-like II | IVIEMARE (759-766) | E762 |
| | | (SEQ ID NO: 261) | |
| 3 | HNH-motif | DVDHIVPQSFLKDDSIDNKVLTRSDKN | H840, N854, N863 |
| | | (837-863) (SEQ ID NO: 262) | |
| 4 | RuvC-like | HHAHDAYL (982-989) | H982, H983, A984, |
| | III | (SEQ ID NO: 263) | D986, A987 |

[0094] In addition to the above, a variant Cas9 protein can have the same parameters for sequence identity as described above for Cas9 proteins. Thus, in some cases, a suitable variant Cas9 protein comprises an amino acid sequence having 4 motifs, each of motifs 1-4 having 60% or more, 70% or more, 75% or more, 80% or more, 85% or more, 90% or more, 95% or more, 99% or more or 100% amino acid sequence identity to motifs 1-4 of the Cas9 amino acid sequence set forth as SEQ ID NO:8 (the motifs are in Table 1, below, and are set forth as SEQ ID NOs: 260-263, respectively), or to the corresponding portions in any of the amino acid sequences set forth in SEQ ID NOs:1-256, 795-1346, and 1545.

[0095] In some cases, a suitable variant Cas9 protein comprises an amino acid sequence having 4 motifs, each of motifs 1-4 having 60% or more amino acid sequence identity to motifs 1-4 of the Cas9 amino acid sequence set forth as SEQ ID NO:8 (the motifs are in Table 1, below, and are set forth as SEQ ID NOs: 260-263, respectively), or to the corresponding portions in any of the amino acid sequences set forth in SEQ ID NOs:1-256, 795-1346, and 1545.

[0096] In some cases, a suitable variant Cas9 protein comprises an amino acid sequence having 4 motifs, each of motifs 1-4 having 70% or more amino acid sequence identity to motifs 1-4 of the Cas9 amino acid sequence set forth as SEQ ID NO:8 (the motifs are in Table 1, below, and are set forth as SEQ ID NOs: 260-263, respectively), or to the corresponding portions in any of the amino acid sequences set forth in SEQ ID NOs:1-256, 795-1346, and 1545.

[0097] In some cases, a suitable variant Cas9 protein comprises an amino acid sequence having 4 motifs, each of motifs 1-4 having 75% or more amino acid sequence identity to motifs 1-4 of the Cas9 amino acid sequence set forth as SEQ ID NO:8 (the motifs are in Table 1, below, and are set forth as SEQ ID NOs: 260-263, respectively), or to the corresponding portions in any of the amino acid sequences set forth in SEQ ID NOs:1-256, 795-1346, and 1545.

[0098] In some cases, a suitable variant Cas9 protein comprises an amino acid sequence having 4 motifs, each of motifs 1-4 having 80% or more amino acid sequence identity to motifs 1-4 of the Cas9 amino acid sequence set forth as SEQ ID NO:8 (the motifs are in Table 1, below, and are set forth as SEQ ID NOs: 260-263, respectively), or to the corresponding portions in any of the amino acid sequences set forth in SEQ ID NOs:1-256, 795-1346, and 1545.

[0099] In some cases, a suitable variant Cas9 protein comprises an amino acid sequence having 4 motifs, each of motifs 1-4 having 85% or more amino acid sequence identity to motifs 1-4 of the Cas9 amino acid sequence set forth as SEQ ID NO:8 (the motifs are in Table 1, below, and are set forth as SEQ ID NOs: 260-263, respectively), or to the corresponding portions in any of the amino acid sequences set forth in SEQ ID NOs:1-256, 795-1346, and 1545.

[0100] In some cases, a suitable variant Cas9 protein comprises an amino acid sequence having 4 motifs, each of motifs 1-4 having 90% or more amino acid sequence identity to motifs 1-4 of the Cas9 amino acid sequence set forth as SEQ ID NO:8 (the motifs are in Table 1, below, and are set forth as SEQ ID NOs: 260-263, respectively), or to the corresponding portions in any of the amino acid sequences set forth in SEQ ID NOs:1-256, 795-1346, and 1545.

[0101] In some cases, a suitable variant Cas9 protein comprises an amino acid sequence having 4 motifs, each of motifs 1-4 having 95% or more amino acid sequence identity to motifs 1-4 of the Cas9 amino acid sequence set forth as SEQ ID NO:8 (the motifs are in Table 1, below, and are set forth as SEQ ID NOs: 260-263, respectively), or to the corresponding portions in any of the amino acid sequences set forth in SEQ ID NOs:1-256, 795-1346, and 1545.

[0102] In some cases, a suitable variant Cas9 protein comprises an amino acid sequence having 4 motifs, each of motifs 1-4 having 99% or more amino acid sequence identity to motifs 1-4 of the Cas9 amino acid sequence set forth as SEQ ID NO:8 (the motifs are in Table 1, below, and are set forth as SEQ ID NOs: 260-263, respectively), or to the corresponding portions in any of the amino acid sequences set forth in SEQ ID NOs:1-256, 795-1346, and 1545.

[0103] In some cases, a suitable variant Cas9 protein comprises an amino acid sequence having 4 motifs, each of motifs 1-4 having 100% amino acid sequence identity to motifs 1-4 of the Cas9 amino acid sequence set forth as SEQ ID NO:8 (the motifs are in Table 1, below, and are set forth as SEQ ID NOs: 260-263, respectively), or to the corresponding portions in any of the amino acid sequences set forth in SEQ ID NOs:1-256, 795-1346, and 1545.

[0104] In some cases, a suitable variant Cas9 protein comprises an amino acid sequence having 60% or more, 70% or more, 75% or more, 80% or more, 85% or more, 90% or more, 95% or more, 99% or more, or 100% amino acid sequence identity to amino acids 7-166 or 731-1003 of the Cas9 amino acid sequence set forth in SEQ ID NO: 8, or to the corresponding portions in any of the amino acid sequences set forth as SEQ ID NOs:1-256, 795-1346, and 1545. Any Cas9 protein as defined above can be used as a variant Cas9 protein or as part of a chimeric variant Cas9 protein of the subject methods.

[0105] In some cases, a suitable variant Cas9 protein comprises an amino acid sequence having 60% or more amino acid sequence identity to amino acids 7-166 or 731-1003 of the Cas9 amino acid sequence set forth in SEQ ID NO: 8, or to the corresponding portions in any of the amino acid sequences set forth as SEQ ID NOs:1-256, 795-1346, and 1545. Any Cas9 protein as defined above can be used as a variant Cas9 protein or as part of a chimeric variant Cas9 protein of the subject methods.

[0106] In some cases, a suitable variant Cas9 protein comprises an amino acid sequence having 70% or more amino acid sequence identity to amino acids 7-166 or 731-1003 of the Cas9 amino acid sequence set forth in SEQ ID NO: 8, or to the corresponding portions in any of the amino acid sequences set forth as SEQ ID NOs:1-256, 795-1346, and 1545. Any Cas9 protein as defined above can be used as a variant Cas9 protein or as part of a chimeric variant Cas9 protein of the subject methods.

[0107] In some cases, a suitable variant Cas9 protein comprises an amino acid sequence having 75% or more amino acid sequence identity to amino acids 7-166 or 731-1003 of the Cas9 amino acid sequence set forth in SEQ ID NO: 8, or to the corresponding portions in any of the amino acid sequences set forth as SEQ ID NOs:1-256, 795-1346, and 1545. Any Cas9 protein as defined above can be used as a variant Cas9 protein or as part of a chimeric variant Cas9 protein of the subject methods.

[0108] In some cases, a suitable variant Cas9 protein comprises an amino acid sequence having 80% or more amino acid sequence identity to amino acids 7-166 or 731-1003 of the Cas9 amino acid sequence set forth in SEQ ID NO: 8, or to the corresponding portions in any of the amino acid sequences set forth as SEQ ID NOs:1-256, 795-1346, and 1545. Any Cas9 protein as defined above can be used as a variant Cas9 protein or as part of a chimeric variant Cas9 protein of the subject methods.

[0109] In some cases, a suitable variant Cas9 protein comprises an amino acid sequence having 85% or more amino acid sequence identity to amino acids 7-166 or 731-1003 of the Cas9 amino acid sequence set forth in SEQ ID NO: 8, or to the corresponding portions in any of the amino acid sequences set forth as SEQ ID NOs:1-256, 795-1346, and 1545. Any Cas9 protein as defined above can be used as a variant Cas9 protein or as part of a chimeric variant Cas9 protein of the subject methods.

[0110] In some cases, a suitable variant Cas9 protein comprises an amino acid sequence having 90% or more amino acid sequence identity to amino acids 7-166 or 731-1003 of the Cas9 amino acid sequence set forth in SEQ ID NO: 8, or to the corresponding portions in any of the amino acid sequences set forth as SEQ ID NOs:1-256, 795-1346, and 1545. Any Cas9 protein as defined above can be used as a variant Cas9 protein or as part of a chimeric variant Cas9 protein of the subject methods.

[0111] In some cases, a suitable variant Cas9 protein comprises an amino acid sequence having 95% or more amino acid sequence identity to amino acids 7-166 or 731-1003 of the Cas9 amino acid sequence set forth in SEQ ID NO: 8, or to the corresponding portions in any of the amino acid sequences set forth as SEQ ID NOs:1-256, 795-1346, and 1545. Any Cas9 protein as defined above can be used as a variant Cas9 protein or as part of a chimeric variant Cas9 protein of the subject methods.

[0112] In some cases, a suitable variant Cas9 protein comprises an amino acid sequence having 99% or more amino acid sequence identity to amino acids 7-166 or 731-1003 of the Cas9 amino acid sequence set forth in SEQ ID NO: 8, or to the corresponding portions in any of the amino acid sequences set forth as SEQ ID NOs:1-256, 795-1346, and 1545. Any Cas9 protein as defined above can be used as a variant Cas9 protein or as part of a chimeric variant Cas9 protein of the subject methods.

[0113] In some cases, a suitable variant Cas9 protein comprises an amino acid sequence having 100% amino acid sequence identity to amino acids 7-166 or 731-1003 of the Cas9 amino acid sequence set forth in SEQ ID NO: 8, or to the corresponding portions in any of the amino acid sequences set forth as SEQ ID NOs:1-256, 795-1346, and 1545. Any Cas9 protein as defined above can be used as a variant Cas9 protein or as part of a chimeric variant Cas9 protein of the subject methods.

[0114] In some cases, a suitable variant Cas9 protein comprises an amino acid sequence having 60% or more, 70% or more, 75% or more, 80% or more, 85% or more, 90% or more, 95% or more, 99% or more, or 100% amino acid sequence identity to the Cas9 amino acid sequence set forth in SEQ ID NO: 8, or to any of the amino acid sequences set forth as SEQ ID NOs:1-256, 795-1346, and 1545. Any Cas9 protein as defined above can be used as a variant Cas9 protein or as part of a chimeric variant Cas9 protein of the subject methods.

[0115] In some cases, a suitable variant Cas9 protein comprises an amino acid sequence having 60% or more amino acid sequence identity to the Cas9 amino acid sequence set forth in SEQ ID NO: 8, or to any of the amino acid sequences set forth as SEQ ID NOs:1-256, 795-1346, and 1545. Any Cas9 protein as defined above can be used as a variant Cas9 protein or as part of a chimeric variant Cas9 protein of the subject methods.

[0116] In some cases, a suitable variant Cas9 protein comprises an amino acid sequence having 70% or more amino acid sequence identity to the Cas9 amino acid sequence set forth in SEQ ID NO: 8, or to any of the amino acid sequences set forth as SEQ ID NOs:1-256, 795-1346, and 1545. Any Cas9 protein as defined above can be used as a variant Cas9 protein or as part of a chimeric variant Cas9 protein of the subject methods.

[0117] In some cases, a suitable variant Cas9 protein comprises an amino acid sequence having 75% or more amino acid sequence identity to the Cas9 amino acid sequence set forth in SEQ ID NO: 8, or to any of the amino acid sequences set forth as SEQ ID NOs:1-256, 795-1346, and 1545. Any Cas9 protein as defined above can be used as a variant Cas9 protein or as part of a chimeric variant Cas9 protein of the subject methods.

[0118] In some cases, a suitable variant Cas9 protein comprises an amino acid sequence having 80% or more amino acid sequence identity to the Cas9 amino acid sequence set forth in SEQ ID NO: 8, or to any of the amino acid sequences set forth as SEQ ID NOs:1-256, 795-1346, and 1545. Any Cas9 protein as defined above can be used as a variant Cas9 protein or as part of a chimeric variant Cas9 protein of the subject methods.

[0119] In some cases, a suitable variant Cas9 protein comprises an amino acid sequence having 85% or more amino acid sequence identity to the Cas9 amino acid sequence set forth in SEQ ID NO: 8, or to any of the amino acid sequences set forth as SEQ ID NOs:1-256, 795-1346, and 1545. Any Cas9 protein as defined above can be used as a variant Cas9 protein or as part of a chimeric variant Cas9 protein of the subject methods.

[0120] In some cases, a suitable variant Cas9 protein comprises an amino acid sequence having 90% or more amino acid sequence identity to the Cas9 amino acid sequence set forth in SEQ ID NO: 8, or to any of the amino acid sequences set forth as SEQ ID NOs:1-256, 795-1346, and 1545. Any Cas9 protein as defined above can be used as a variant Cas9 protein or as part of a chimeric variant Cas9 protein of the subject methods.

[0121] In some cases, a suitable variant Cas9 protein comprises an amino acid sequence having 95% or more amino acid sequence identity to the Cas9 amino acid sequence set forth in SEQ ID NO: 8, or to any of the amino acid sequences set forth as SEQ ID NOs:1-256, 795-1346, and 1545. Any Cas9 protein as defined above can be used as a variant Cas9 protein or as part of a chimeric variant Cas9 protein of the subject methods.

[0122] In some cases, a suitable variant Cas9 protein comprises an amino acid sequence having 99% or more amino acid sequence identity to the Cas9 amino acid sequence set forth in SEQ ID NO: 8, or to any of the amino acid sequences set forth as SEQ ID NOs:1-256, 795-1346, and 1545. Any Cas9 protein as defined above can be used as a variant Cas9 protein or as part of a chimeric variant Cas9 protein of the subject methods.

[0123] In some cases, a suitable variant Cas9 protein comprises an amino acid sequence having 100% amino acid sequence identity to the Cas9 amino acid sequence set forth in SEQ ID NO: 8, or to any of the amino acid sequences set forth as SEQ ID NOs:1-256, 795-1346, and 1545.

[0124] Any variant Cas9 protein defined above can be used as a variant Cas9 protein or as part of a chimeric variant Cas9 protein of the subject methods and compositions. For example, a subject reporter Cas9 protein (as described below) can include any combination of the above described mutations/substitutions (in addition to including signaling partners, as described below). For example, a subject reporter Cas9 protein can be a reporter dCas9 protein, a reporter nickase Cas9 protein, a reporter chimeric Cas9 protein, etc.

### Reporter and Variant Cas9 Proteins

[0125] This disclosure provides reporter Cas9 proteins and variant Cas9 proteins. Reporter Cas9 proteins and variant Cas9 proteins are Cas9 proteins that can be used to monitor/detect conformational changes of the Cas9 protein. The term “reporter Cas9” refers to a Cas9 protein that has been modified to include a signal pair (having a two signal partners) that can be used to detect a change in signal upon a conformational change of a Cas9 protein. Because a reporter Cas9 protein is a modified protein (e.g., is attached to labels, e.g., signal partners of a signal pair, in some cases includes cysteine mutations, etc.), it is a form of variant Cas9 protein. In some cases, each signal partner of a signal pair is attached (e.g., conjugated) to a residue of the Cas9 protein. In some cases, the residue to which a signal partner is attached is a cysteine residue.

[0126] The term “variant Cas9” in some cases refers to a Cas9 protein that has been modified to include two cysteine residues (e.g., as substitutions, as insertions) that are not present in the corresponding wild type Cas9 protein. In some, such a variant Cas9 protein has been modified to remove naturally existing cysteines (e.g., a cysteine residue corresponding to C80 and/or C574 of the S. pyogenes Cas9 protein set forth in SEQ ID NO: 2). For example, in some cases, naturally existing cysteines are removed and/or mutated (e.g., substituted to a serine residue, e.g., a substitution to serine of the cysteine residue corresponding to C80 and/or C574 of the S. pyogenes Cas9 protein set forth in SEQ ID NO: 2, e.g, C80S and/or C574S). In some cases, a subject variant Cas9 protein (e.g., having two cysteine residues not present in a corresponding wild type Cas9 protein) is used to produce/generate a reporter Cas9 protein, e.g., by modifying the protein at the cysteines to incorporate/attach (e.g., via conjugation) a signal pair (one signal partner attached/conjugated to each of the two cysteines). Thus, in some cases, in order to produce a reporter Cas9 protein, a Cas9 protein (e.g., in some cases a variant Cas9 protein having two non-naturally occurring cysteine residues) is labeled (e.g., by attaching/conjugating a signal partner). As noted above, in some cases, in order to limit the conjugation of the signal partners to the desired residues (e.g., the desired residue pair) (e.g., to avoid attaching a signal moiety or quencher moiety to a cysteine present elsewhere in the protein), the naturally existing cysteine residues of the Cas9 protein can be mutated (e.g., changed to another residue, e.g., a C to S substitution, deleted, and the like). For example, in some cases, a reporter Cas9 protein includes a substitution at the C80 and/or the C574 position (e.g., C80S and/or C574S) (as numbered according to the amino acid sequence set forth in SEQ ID NO: 2, or the corresponding amino acid position(s) in a corresponding wild type Cas9 protein).

[0127] As used herein, the term “residue pair” or “amino acid pair” is used to refer to the positions of a Cas9 protein that can be used to generate a reporter and/or variant Cas9 protein. For example, the residue corresponding to D435 and E945 of the S. pyogenes Cas9 protein set forth in SEQ ID NO: 2 are an example of a subject residue pair. When those positions are mutated to cysteine residues (e.g., when a variant Cas9 protein and/or a reporter Cas9 protein includes a cysteine at each of those positions), the variant Cas9 protein and/or reporter Cas9 protein can be said to include a cysteine pair at those positions.

[0128] As discussed in more detail below (e.g., see Table 3), suitable examples of residue pairs include, but are not limited to: (a) the residue corresponding to D435 and E945 of the S. pyogenes Cas9 protein set forth in SEQ ID NO: 2; (b) the residue corresponding to S355 and D1328 of the S. pyogenes Cas9 protein set forth in SEQ ID NO: 2; (c) the residue corresponding to S867 and N1054 of the S. pyogenes Cas9 protein set forth in SEQ ID NO: 2; and (d) the residue corresponding to S867 and S355 of the S. pyogenes Cas9 protein set forth in SEQ ID NO: 2.

[0129] One example variant Cas9 protein can include a cysteine pair, where the first cysteine (of the pair) is located at the amino acid position corresponding to D435 of the S. pyogenes Cas9 protein set forth in SEQ ID NO: 2 and the second cysteine (of the pair) is located at the amino acid position corresponding to E945 of the S. pyogenes Cas9 protein set forth in SEQ ID NO: 2. Likewise, one example reporter Cas9 protein can include a signal pair (having a first and second signal partner), where the first signal partner of the pair is located at the amino acid position corresponding to D435 of the S. pyogenes Cas9 protein set forth in SEQ ID NO: 2 and the second signal partner of the pair is located at the amino acid position corresponding to E945 of the S. pyogenes Cas9 protein set forth in SEQ ID NO: 2.

[0130] One example variant Cas9 protein can include a cysteine pair, where the first cysteine (of the pair) is located at the amino acid position corresponding to S355 of the S. pyogenes Cas9 protein set forth in SEQ ID NO: 2 and the second cysteine (of the pair) is located at the amino acid position corresponding to D1328 of the S. pyogenes Cas9 protein set forth in SEQ ID NO: 2. Likewise, one example reporter Cas9 protein can include a signal pair (having a first and second signal partner), where the first signal partner of the pair is located at the amino acid position corresponding to S355 of the S. pyogenes Cas9 protein set forth in SEQ ID NO: 2 and the second signal partner of the pair is located at the amino acid position corresponding to D1328 of the S. pyogenes Cas9 protein set forth in SEQ ID NO: 2.

[0131] One example variant Cas9 protein can include a cysteine pair, where the first cysteine (of the pair) is located at the amino acid position corresponding to S867 of the S. pyogenes Cas9 protein set forth in SEQ ID NO: 2 and the second cysteine (of the pair) is located at the amino acid position corresponding to N1054 of the S. pyogenes Cas9 protein set forth in SEQ ID NO: 2. Likewise, one example reporter Cas9 protein can include a signal pair (having a first and second signal partner), where the first signal partner of the pair is located at the amino acid position corresponding to S867 of the S. pyogenes Cas9 protein set forth in SEQ ID NO: 2 and the second signal partner of the pair is located at the amino acid position corresponding to N1054 of the S. pyogenes Cas9 protein set forth in SEQ ID NO: 2.

[0132] One example variant Cas9 protein can include a cysteine pair, where the first cysteine (of the pair) is located at the amino acid position corresponding to S867 of the S. pyogenes Cas9 protein set forth in SEQ ID NO: 2 and the second cysteine (of the pair) is located at the amino acid position corresponding to S355 of the S. pyogenes Cas9 protein set forth in SEQ ID NO: 2. Likewise, one example reporter Cas9 protein can include a signal pair (having a first and second signal partner), where the first signal partner of the pair is located at the amino acid position corresponding to S867 of the S. pyogenes Cas9 protein set forth in SEQ ID NO: 2 and the second signal partner of the pair is located at the amino acid position corresponding to S355 of the S. pyogenes Cas9 protein set forth in SEQ ID NO: 2.

[0133] In some cases, one of the residues of a residue pair (e.g., one of the signal partners of a signal pair; one of the cysteines of a cysteine pair) is a “static” residue (or “static” amino acid), which means that the residue exhibits little change in three dimensional position relative to the rest of the Cas9 protein, and in comparison to the other residue of the residue pair (the “dynamic” partner or “dynamic” amino acid), which exhibits a large change in position (e.g., a large enough change in position to elicit a detectable change in signal exhibited by a reporter Cas9 protein). Thus, in some cases, a variant Cas9 protein and/or a reporter Cas9 protein includes a cysteine pair (two cysteines) where one cysteine is a static residue and the other is a dynamic residue. Likewise, in some cases, a variant Cas9 protein and/or a reporter Cas9 protein includes a signal pair (having a first and a second signal partner) where one signal partner is a static partner and the other is a dynamic partner. In some cases, both members of a residue pair (e.g., both cysteines of a cysteine pair, both signal partners of a signal pair) are dynamic, meaning that both residues exhibit a change in three dimensional position upon the conformational change of interest.

### Signal Partners

[0134] As used herein, the term “signal partner” or “signal partners” refer to moities that can be used to label a Cas9 protein (e.g., a subject variant Cas9 protein), e.g., in order to achieve a change in detectable signal upon a conformational change of a Cas9 protein. Such a change can be a change in the nature of the signal (e.g., a change in wavelength of detected signal) upon conformational change of interest and/or can be a change in the amplitude of detected signal (e.g., a decrease or increase in the amount of detected signal) upon conformational change. The term “signal pair” is used to refer to a pair of signal partners (a first signal partner and a second signal partner) that are paired to produce a signal. In some cases, e.g., when the signal pair is a signal quenching pair, a signal is produced by one member of the signal pair when the other member is not in close proximity but the signal is reduced when the signal partners are in close proximity. In some cases, e.g., when the signal pair is a FRET pair, a signal is produced when the signal partners are in close proximity, but a decrease in signal is produced when the signal partners are separated.

[0135] In some cases, a signal pair is referred to as a “low-to-high” signal pair. A low-to-high signal pair exhibits low or no detectable signal prior to the conformational change of interest, and exhibits an increase in the amount of detectable signal subsequent to the conformational change. In some cases, a signal pair is referred to as a “high-to-low” signal pair. A high-to-low signal pair exhibits a detectable signal prior to the conformational change of interest, and exhibits a decrease in the amount of detectable signal (exhibits a reduced signal) subsequent to the conformational change.

[0136] In some cases, a conformational change is referred to herein as a ‘close-to-far’ conformational change or a ‘far-to-close’ conformational change. When a change is a ‘close-to-far’ conformational change, the residue pair is separated prior to the conformational change and in close proximity upon the conformational change. Thus, for a ‘close-to-far’ conformational change, a signal quenching pair (described in more detail below) will be considered a low-to-high′ signal pair and a FRET pair (described in more detail below) will be considered a ‘high-to-low’ signal pair.

[0137] Likewise, when a change is a ‘far-to-close’ conformational change, the residue pair is in close proximity prior to the conformational change and separated upon the conformational change. Thus, for a ‘far-to-close’ conformational change, a signal quenching pair will be considered a ‘high-to-low’ signal pair and a FRET pair will be considered a low-to-high′ signal pair. Thus, a conformational change of interest can be detected via an increase in signal or a decrease in signal depending on the signal pair that is selected.

[0138] A given reporter Cas9 protein can include one or more signal pairs. For example, a given reporter Cas9 protein can include two or more signal pairs (e.g., three or more, four or more, 2, 3, or 4 signal pairs), where each pair is distinguishable from the others. As such, a first signal pair (which reports a given conformational change) can be a low-to-high or high-to-low signal pair and exhibit a first detectable signal, while a second signal pair (which can report a different conformational change) in the same reporter Cas9 protein can independently be a low-to-high or high-to-low signal pair and exhibit a second detectable signal that is distinguishable from the first detectable signal.

[0139] Various signal partners can be selected in various configurations and combinations (and any convenient configuration/combination can be used), depending on considerations that include: the conformational change of interest, the type of detectable signal, and whether an increase or decrease in signal is desired upon conformational change, and the like.

[0140] In some cases, a signal pair is a FRET pair (includes a FRET donor moiety and a FRET acceptor moiety). In some cases, a signal pair is a signal quenching pair (includes a signal moiety and a quencher moiety).

### FRET Pair

[0141] Fluorescence resonance energy transfer (FRET) is a process by which radiationless transfer of energy occurs from an excited state fluorophore to a second chromophore in close proximity. The range over which the energy transfer can take place is limited to approximately 10 nanometers (100 angstroms), and the efficiency of transfer is extremely sensitive to the separation distance between fluorophores. Thus, as used herein, the term “FRET” (“fluorescence resonance energy transfer”; also known as “Forster resonance energy transfer”) refers to a physical phenomenon involving a donor fluorophore and a matching acceptor fluorophore selected so that the emission spectrum of the donor overlaps the excitation spectrum of the acceptor, and further selected so that when donor and acceptor are in close proximity (usually 10 nm or less), excitation of the donor will cause excitation of and emission from the acceptor, as some of the energy passes from donor to acceptor via a quantum coupling effect. Thus, a FRET signal serves as a proximity gauge of the donor and acceptor; only when they are in close proximity is a signal generated. The FRET donor moiety (e.g, donor fluorophore) and FRET acceptor moiety (e.g., acceptor fluorophore) are collectively referred to herein as a “FRET pair”.

[0142] In some cases, the signal exhibited by a subject reporter Cas9 is a FRET signal. The donor-acceptor pair (a FRET donor moiety and a FRET acceptor moiety) is referred to herein as a “FRET pair” or a “signal FRET pair.” Thus, in some cases, a subject reporter Cas9 includes two signal partners (a signal pair), when one signal partner is a FRET donor moiety and the other signal partner is a FRET acceptor moiety. A subject reporter Cas9 protein that includes such a FRET pair (a FRET donor moiety and a FRET acceptor moiety) will thus exhibit a detectable signal (a FRET signal) when the signal partners are in close proximity, but the signal will be reduced (or absent) when the partners are separated. Such a pair can be configured to be a low-to-high signal pair (e.g., a “low-to-high FRET pair”) or a high-to-low signal pair (e.g., a “high-to-low FRET pair”).

[0143] For example, if a signal pair is a FRET pair, and an increase in signal (e.g., a “low-to-high FRET pair”) is desired upon the conformational change of interest, then the two signal partners can be positioned (e.g, conjugated to amino acids) such that they are separated prior to the conformational change (and thus exhibit low or no signal) and are in close proximity subsequent to the conformational change (and thus exhibit an increase in detectable signal).

[0144] As another example, if a signal pair is a FRET pair, and a decrease in signal (e.g., a “high-to-low FRET pair”) is desired upon the conformational change of interest, then the signal partners can be positioned (e.g, conjugated to amino acids) such that they are in close proximity prior to the conformational change (and thus exhibit a detectable signal) and are separated subsequent to the conformational change (and thus exhibit a reduction in signal). FRET donor and acceptor moieties (FRET pairs) will be known to one of ordinary skill in the art and any convenient FRET pair (e.g., any convenient donor and acceptor moiety pair) can be used. Examples of suitable FRET pairs include but are not limited to those presented in Table 2.

TABLE 2
Examples of FRET pairs (donor and acceptor FRET moieties)

| Donor | Acceptor |
|---|---|
| Tryptophan | Dansyl |
| IAEDANS (1) | DDPM (2) |
| BFP | DsRFP |
| Dansyl | FITC |
| Dansyl | Octadecylrhodamine |
| CFP | GFP |
| CF (3) | Texas Red |
| Fluorescein | Tetramethylrhodamine |
| Cy3 | Cy5 |
| GFP | YFP |
| BODIPY FL (4) | BODIPY FL (4) |
| Rhodamine 110 | Cy3 |
| Rhodamine 6G | Malachite Green |
| FITC | Eosin Thiosemicarbazide |
| B-Phycoerythrin | Cy5 |
| Cy5 | Cy5.5 |

(1) 5-(2-iodoacetylaminoethyl)aminonaphthalene-1-sulfonic acid
(2) N-(4-dimethylamino-3,5-dinitrophenyl)maleimide
(3) carboxyfluorescein succinimidyl ester
(4) 4,4-difluoro-4-bora-3a,4a-diaza-s-indacene

### Signal Quenching Pair

[0145] In some cases, the signal exhibited by one signal partner (a signal moiety) is quenched by the other signal partner (a quencher signal moiety) either prior to or subsequent to the Cas9 conformational change of interest. Such a signal pair is referred to herein as a “quenching pair” or a “signal quenching pair.” For example, in some cases, one signal partner (e.g., the first signal partner) is a signal moiety that produces a detectable signal that is quenched by the second signal partner (e.g., a quencher moiety). The signal partners of such signal quenching pair will thus produce a detectable signal when the partners are separated, but the signal will be quenched when the partners are in close proximity Such a pair can be configured to be a low-to-high signal pair (e.g., a “low-to-high quenching pair”) or a high-to-low signal pair (e.g., a “high-to-low quenching pair”).

[0146] For example, if a signal pair is a signal quenching pair, and an increase in signal is desired (e.g., a “low-to-high quenching pair”) upon the conformational change of interest, then the signal partners can be positioned (e.g., attached/conjugated to amino acids) such that they are in close proximity prior to the conformational change (and thus exhibit low or no signal) and are separated subsequent to the conformational change (and thus exhibit an increase in signal).

[0147] As another example, if a signal pair is a signal quenching pair, and an decrease in signal is desired (e.g., a “high-to-low quenching pair”) upon the conformational change of interest, then the signal partners can be positioned (e.g., attached/conjugated to amino acids) such that they are separated prior to the conformational change (and thus exhibit a signal) and are in close proximity subsequent to the conformational change (and thus exhibit a reduction in signal).

[0148] As noted above, one signal partner of a signal quenching pair produces a detectable signal and the other signal partner is a quencher moiety that quenches the detectable signal of the first signal partner (i.e., the quencher moiety quenches the signal of the signal moiety such that the signal from the signal moiety is reduced (quenched) when the signal partners are in proximity to one another, e.g., when the signal partners of the signal pair are in close proximity).

[0149] A quencher moiety can quench a signal from the signal moiety (prior to or subsequent to the Cas9 conformational change of interest, depending on whether the pair is a low-to-high or high-to-low pair) to various degrees. In some cases, a quencher moiety quenches the signal from the signal moiety where the signal detected in the presence of the quencher moiety (when the signal partners are in proximity to one another) is 95% or less of the signal detected in the absence of the quencher moiety (when the signal partners are separated). For example, in some cases, the signal detected in the presence of the quencher moiety can be 90% or less, 80% or less, 70% or less, 60% or less, 50% or less, 40% or less, 30% or less, 20% or less, 15% or less, 10% or less, or 5% or less of the signal detected in the absence of the quencher moiety. In some cases, no signal (e.g., above background) is detected in the presence of the quencher moiety.

[0150] In some cases, the signal detected in the absence of the quencher moiety (when the signal partners are separated) is at least 1.2 fold greater (e.g., at least 1.3 fold, at least 1.5 fold, at least 1.7 fold, at least 2 fold, at least 2.5 fold, at least 3 fold, at least 3.5 fold, at least 4 fold, at least 5 fold, at least 7 fold, at least 10 fold, at least 20 fold, or at least 50 fold greater) than the signal detected in the presence of the quencher moiety (when the signal partners are in proximity to one another).

[0151] A signal moiety and/or a quencher moiety can be attached to a Cas9 protein in any convenient way. For example, a signal moiety and/or a quencher moiety can be conjugated to a cysteine residue using any convenient method. For example, a signal quenching pair can be attached/conjugated to amino acids at appropriate positions in the Cas9 protein (e.g., positions such that the conformational change of interest will elicit the desired change in detectable signal, e.g, at a suitable residue pair).

[0152] In some cases, the signal moiety is a fluorescent label. In some such cases, the quencher moiety quenches the signal (the light signal) from the fluorescent label (e.g., by absorbing energy in the emission spectra of the label). Thus, when the quencher moiety is not in proximity with the signal moiety, the emission (the signal) from the fluorescent label is detectable because the signal is not absorbed by the quencher moiety. Any convenient donor acceptor pair (signal moiety/quencher moiety pair) can be used and many suitable pairs are known in the art.

[0153] In some cases the quencher moiety absorbs energy from the signal moiety (also referred to herein as a “detectable label”) and then emits a signal (e.g., light at a different wavelength). Thus, in some cases, the quencher moiety is itself a signal moiety (e.g., a signal moiety can be 6-carboxyfluorescein while the quencher moiety can be 6-carboxy-tetramethylrhodamine), and in some such cases, the pair could also be a FRET pair. In some cases, a quencher moiety is a dark quencher. A dark quencher can absorb excitation energy and dissipate the energy in a different way (e.g., as heat). Thus, a dark quencher has minimal to no fluorescence of its own (does not emit fluorescence). Examples of dark quenchers are further described in U.S. Pat. Nos. 8,822,673 and 8,586,718; U.S. patent publications 20140378330, 20140349295, and 20140194611; and international patent applications: WO200142505 and WO200186001, all if which are hereby incorporated by reference in their entirety.

[0154] Examples of fluorescent labels include, but are not limited to: an Alexa Fluor® dye, an ATTO dye (e.g., ATTO 390, ATTO 425, ATTO 465, ATTO 488, ATTO 495, ATTO 514, ATTO 520, ATTO 532, ATTO Rho6G, ATTO 542, ATTO 550, ATTO 565, ATTO Rho3B, ATTO Rho11, ATTO Rho12, ATTO Thio12, ATTO Rho101, ATTO 590, ATTO 594, ATTO Rho13, ATTO 610, ATTO 620, ATTO Rho14, ATTO 633, ATTO 647, ATTO 647N, ATTO 655, ATTO Oxa12, ATTO 665, ATTO 680, ATTO 700, ATTO 725, ATTO 740), a DyLight dye, a cyanine dye (e.g., Cy2, Cy3, Cy3.5, Cy3b, Cy5, Cy5.5, Cy7, Cy7.5), a FluoProbes dye, a Sulfo Cy dye, a Seta dye, an IRIS Dye, a SeTau dye, an SRfluor dye, a Square dye, fluorescein (FITC), tetramethylrhodamine (TRITC), Texas Red, Oregon Green, Pacific Blue, Pacific Green, Pacific Orange, quantum dots, and a tethered fluorescent protein.

[0155] In some cases, a detectable label is a fluorescent label selected from: an Alexa Fluor® dye, an ATTO dye (e.g., ATTO 390, ATTO 425, ATTO 465, ATTO 488, ATTO 495, ATTO 514, ATTO 520, ATTO 532, ATTO Rho6G, ATTO 542, ATTO 550, ATTO 565, ATTO Rho3B, ATTO Rho11, ATTO Rho12, ATTO Thio12, ATTO Rho101, ATTO 590, ATTO 594, ATTO Rho13, ATTO 610, ATTO 620, ATTO Rho14, ATTO 633, ATTO 647, ATTO 647N, ATTO 655, ATTO Oxa12, ATTO 665, ATTO 680, ATTO 700, ATTO 725, ATTO 740), a DyLight dye, a cyanine dye (e.g., Cy2, Cy3, Cy3.5, Cy3b, Cy5, Cy5.5, Cy7, Cy7.5), a FluoProbes dye, a Sulfo Cy dye, a Seta dye, an IRIS Dye, a SeTau dye, an SRfluor dye, a Square dye, fluorescein (FITC), tetramethylrhodamine (TRITC), Texas Red, Oregon Green, Pacific Blue, Pacific Green, and Pacific Orange.

[0156] In some cases, a detectable label is a fluorescent label selected from: an Alexa Fluor® dye, an ATTO dye (e.g., ATTO 390, ATTO 425, ATTO 465, ATTO 488, ATTO 495, ATTO 514, ATTO 520, ATTO 532, ATTO Rho6G, ATTO 542, ATTO 550, ATTO 565, ATTO Rho3B, ATTO Rho11, ATTO Rho12, ATTO Thio12, ATTO Rho101, ATTO 590, ATTO 594, ATTO Rho13, ATTO 610, ATTO 620, ATTO Rho14, ATTO 633, ATTO 647, ATTO 647N, ATTO 655, ATTO Oxa12, ATTO 665, ATTO 680, ATTO 700, ATTO 725, ATTO 740), a DyLight dye, a cyanine dye (e.g., Cy2, Cy3, Cy3.5, Cy3b, Cy5, Cy5.5, Cy7, Cy7.5), a FluoProbes dye, a Sulfo Cy dye, a Seta dye, an IRIS Dye, a SeTau dye, an SRfluor dye, a Square dye, fluorescein (FITC), tetramethylrhodamine (TRITC), Texas Red, Oregon Green, Pacific Blue, Pacific Green, Pacific Orange, a quantum dot, and a tethered fluorescent protein.

[0157] Examples of ATTO dyes include, but are not limited to: ATTO 390, ATTO 425, ATTO 465, ATTO 488, ATTO 495, ATTO 514, ATTO 520, ATTO 532, ATTO Rho6G, ATTO 542, ATTO 550, ATTO 565, ATTO Rho3B, ATTO Rho11, ATTO Rho12, ATTO Thio12, ATTO Rho101, ATTO 590, ATTO 594, ATTO Rho13, ATTO 610, ATTO 620, ATTO Rho14, ATTO 633, ATTO 647, ATTO 647N, ATTO 655, ATTO Oxa12, ATTO 665, ATTO 680, ATTO 700, ATTO 725, and ATTO 740.

[0158] Examples of AlexaFluor dyes include, but are not limited to: Alexa Fluor® 350, Alexa Fluor® 405, Alexa Fluor® 430, Alexa Fluor® 488, Alexa Fluor® 500, Alexa Fluor® 514, Alexa Fluor® 532, Alexa Fluor® 546, Alexa Fluor® 555, Alexa Fluor® 568, Alexa Fluor® 594, Alexa Fluor® 610, Alexa Fluor® 633, Alexa Fluor® 635, Alexa Fluor® 647, Alexa Fluor® 660, Alexa Fluor® 680, Alexa Fluor® 700, Alexa Fluor® 750, Alexa Fluor® 790, and the like.

[0159] Examples of quencher moieties include, but are not limited to: a dark quencher, a Black Hole Quencher® (BHQ®) (e.g., BHQ-0, BHQ-1, BHQ-2, BHQ-3), a Qxl quencher, an ATTO quencher (e.g., ATTO 540Q, ATTO 580Q, and ATTO 612Q), dimethylaminoazobenzenesulfonic acid (Dabsyl), Iowa Black RQ, Iowa Black FQ, IRDye QC-1, a QSY dye (e.g., QSY 7, QSY 9, QSY 21), AbsoluteQuencher, Eclipse, and metal clusters such as gold nanoparticles, and the like.

[0160] In some cases, a quencher moiety is selected from: a dark quencher, a Black Hole Quencher® (BHQ®) (e.g., BHQ-0, BHQ-1, BHQ-2, BHQ-3), a Qxl quencher, an ATTO quencher (e.g., ATTO 540Q, ATTO 580Q, and ATTO 612Q), dimethylaminoazobenzenesulfonic acid (Dabsyl), Iowa Black RQ, Iowa Black FQ, IRDye QC-1, a QSY dye (e.g., QSY 7, QSY 9, QSY 21), AbsoluteQuencher, Eclipse, and a metal cluster.

[0161] Examples of an ATTO quencher include, but are not limited to: ATTO 540Q, ATTO 580Q, and ATTO 612Q. Examples of a Black Hole Quencher® (BHQ®) include, but are not limited to: BHQ-0 (493 nm), BHQ-1 (534 nm), BHQ-2 (579 nm) and BHQ-3 (672 nm).

[0162] For examples of some detectable labels (e.g., fluorescent dyes) and/or quencher moieties, see, e.g., Bao et. al., Annu Rev Biomed Eng. 2009; 11:25-47; as well as U.S. Pat. Nos. 8,822,673 and 8,586,718; U.S. patent publications 20140378330, 20140349295, 20140194611, 20130323851, 20130224871, 20110223677, 20110190486, 20110172420, 20060179585 and 20030003486; and international patent applications: WO200142505 and WO200186001, all of which are hereby incorporated by reference in their entirety.

### Conformational Changes and Example Positions

[0163] Two examples of Cas9 protein conformational changes that can be detected using the compositions and methods described herein include (but are not limited to): (i) on-target nucleic acid binding (i.e., a Cas9 complex binding on-target to a target nucleic acid (e.g., DNA) leads to a conformational change, where the Cas9 complex includes a Cas9 protein bound to a Cas9 guide RNA); and (ii) Cas9 guide RNA binding (i.e., a Cas9 protein binding to a Cas9 guide RNA leads to a conformational change).

The amino acid (residue) positions below are numbered according to the wild type S. pyogenes Cas9 amino acid sequence set forth in SEQ ID NO: 2, and also refer to the corresponding amino acid position(s) in corresponding Cas9 proteins.

TABLE 3
This table depicts examples of residue pairs (e.g., cysteine pairs,
positions for signal partners of a signal pair, etc.) useful in
the subject compositions, methods, and kits. Each row represents an
example residue pair. Residue numbers are based on the wild type
S. pygogenes Cas9 protein set forth in SEQ ID NO: 2.

| Conformational | Partner 1 | Partner 1 | Partner 2 | Partner 2 |
|---|---|---|---|---|
| Change | (dynamic) | Location | (static) | Location |
| Guide RNA | D435 | alpha-helical | E945 | RuvC domain |
| binding | | lobe | | (e.g., RuvC-III) |
| (close to far) | | | | |
| Guide RNA | S355 | alpha-helical | D1328 | PAM inter- |
| binding | | lobe | | action domain |
| (far to close) | | | | |
| On-target nucleic | S867 | HNH | N1054 | RuvC domain |
| acid binding | | domain | | (e.g., RuvC-III) |
| (close to far) | | | | |
| On-target nucleic | S867 | HNH | S355 | alpha-helical |
| acid binding | | domain | | lobe |
| (far to close) | | | | |
| On-target nucleic | D273 | Helical-II | E60 | Arg domain |
| acid binding | | domain | | (arginine-rich |
| (close to far) | | | | ‘Bridge Helix’) |
| | | | | (“BH”) (“Arg”) |
| On-target nucleic | S701 | Helical-Ill | S960 | RuvC domain |
| acid binding | | domain | | (e.g., RuvC-III) |
| (close to far) | | | | |

### Cas9 Guide RNA Binding

[0164] The residues that form a residue pair (e.g., a cysteine pair, positions for the attachment/conjugation of signal partners that form a signal pair) can be selected based on the conformational change of interest. In some cases, the conformational change of interest (i.e., the conformational change to be detected) is a change exhibited by the Cas9 alpha-helical lobe upon binding to a Cas9 guide RNA. For example, one may wish to screen various candidate Cas9 guide RNAs (e.g., a library of mutated/variant candidate Cas9 guide RNAs) for those that maintain the ability to bind a Cas9 protein. Thus, a subject reporter Cas9 could be used to screen for those guide RNAs that do in fact bind Cas9 and induce a conformational change (e.g., thus allowing one to eliminate those candidate guide RNAs that do not bind and induce the conformational change). Because the nuclease lobe of Cas9 does not exhibit a large scale conformational change (the change is relatively small compared to the change exhibited by the alpha-helical lobe) when Cas9 binds to an appropriate guide RNA, and because the alpha-helical lobe does exhibit a large scale conformational change (i.e., the alpha-helical lobe is a dynamic region of the Cas9 protein when the protein binds to a Cas9 guide RNA), a relatively static amino position (static during the conformational change) can be selected as one of the residue positions (e.g., a position within the RuvC domain or PAM interaction domain), while an amino acid from the alpha-helical lobe can be selected as the other residue position.

[0165] For example, in some cases, a residue pair is selected such that one member (the dynamic member) of the residue pair is positioned in the alpha-helical lobe (e.g., at the amino acid position corresponding to D435 or S355 of the amino acid sequence set forth in SEQ ID NO: 2) of the variant Cas9 protein and the other member (the static member) is positioned (a) in the RuvC domain (e.g., at the amino acid position corresponding to E945 of the amino acid sequence set forth in SEQ ID NO: 2) (close-to-far conformational change upon binding), or (b) in the PAM interaction domain (e.g., at the amino acid position corresponding to D1328 of the amino acid sequence set forth in SEQ ID NO: 2) (far-to-close conformational change upon binding). Thus, in some cases, a signal pair of a subject reporter Cas9 protein is positioned such that one partner (the dynamic partner) of the signal pair is positioned in the alpha-helical lobe (e.g., at the amino acid position corresponding to D435 or S355 of the amino acid sequence set forth in SEQ ID NO: 2) of the reporter Cas9 protein and the other partner (the static partner) is positioned (a) in the RuvC domain (e.g., at the amino acid position corresponding to E945 of the amino acid sequence set forth in SEQ ID NO: 2) (close-to-far conformational change upon binding), or (b) in the PAM interaction domain (e.g., at the amino acid position corresponding to D1328 of the amino acid sequence set forth in SEQ ID NO: 2) (far-to-close conformational change upon binding). Likewise, in some cases, a cysteine pair of a subject variant Cas9 protein is positioned such that one cysteine (the dynamic cysteine) of the cysteine pair is positioned in the alpha-helical lobe (e.g., at the amino acid position corresponding to D435 or S355 of the amino acid sequence set forth in SEQ ID NO: 2) of the variant Cas9 protein and the other cysteine (the static cysteine) is positioned (a) in the RuvC domain (e.g., at the amino acid position corresponding to E945 of the amino acid sequence set forth in SEQ ID NO: 2) (close-to-far conformational change upon binding), or (b) in the PAM interaction domain (e.g., at the amino acid position corresponding to D1328 of the amino acid sequence set forth in SEQ ID NO: 2) (far-to-close conformational change upon binding). See Table 3 for examples.

### E945 and D435 (Close to Far) (See FIG. 6A-6B)

[0166] An example of a residue pair (and thus a cysteine pair and/or a signal pair) in which the members are in close proximity (close) prior to Cas9 guide RNA binding, and are separated (far) subsequent to binding (and can therefore be used for a high-to-low FRET signaling pair or alternatively for low-to-high signal quenching pair) is E945 (static, RuvC domain) and D435 (dynamic, alpha-helical lobe), as numbered according to the wild type S. pyogenes Cas9 amino acid sequence set forth in SEQ ID NO: 2, or the corresponding amino acid position(s) in a corresponding wild type Cas9 protein.

[0167] Thus, in some cases, a subject variant Cas9 protein includes a cysteine at each of positions E945 and D435 (e.g., the variant Cas9 protein can include E945C and D435C mutations). In some cases (e.g., as described above), the variant Cas9 protein also includes substitutions at the C80 and/or the C574 positions (e.g., C80S and/or C574S). In some cases (e.g., as described above), the variant Cas9 protein also includes (a) substitutions at the C80 and/or the C574 positions (e.g., C80S and/or C574S) and/or (b) one or more mutations that render the variant Cas9 protein a variant nickase Cas9 protein or a variant dCas9 protein. As an illustrative example, in some cases, a subject variant Cas9 protein includes (a) cysteines at E945 and D435 (e.g., E945C and D435C); (b) substitutions at the C80 and/or the C574 positions (e.g., C80S and/or C574S); and (c) substitutions at the D10 and/or the H840 positions (e.g., D10A and/or H840A) (or any of the above described positions that can reduce RuvC and/or HNH cleavage activity).

[0168] Likewise, in some cases, a subject reporter Cas9 protein includes one signal partner positioned at an amino acid position corresponding to E945 of the amino acid sequence set forth in SEQ ID NO: 2 and another signal partner positioned at an amino acid position corresponding to D435 of the amino acid sequence set forth in SEQ ID NO: 2.

### D1328 and S355 (Far to Close)

[0169] An example of a residue pair (and thus a cysteine pair and/or a signal pair) in which the members are separated (far) prior to Cas9 guide RNA binding, and are in close proximity (close) subsequent to binding (and can therefore be used for a low-to-high FRET signaling pair or alternatively for a high-to-low signal quenching pair) is D1328 (static, PAM interaction domain) and S355 (dynamic, alpha helical lobe); as numbered according to the wild type S. pyogenes Cas9 amino acid sequence set forth in SEQ ID NO: 2, or the corresponding amino acid position(s) in a corresponding wild type Cas9 protein.

[0170] Thus, in some cases, a subject variant Cas9 protein includes a cysteine at each of positions D1328 and S355 (e.g., the variant Cas9 protein can include D1328C and S355C mutations). In some cases (e.g., as described above), the variant Cas9 protein also includes substitutions at the C80 and/or the C574 positions (e.g., C80S and/or C574S). In some cases (e.g., as described above), the variant Cas9 protein also includes (a) substitutions at the C80 and/or the C574 positions (e.g., C80S and/or C574S) and/or (b) one or more mutations that render the variant Cas9 protein a variant nickase Cas9 protein or a variant dCas9 protein. As an illustrative example, in some cases, a subject variant Cas9 protein includes (a) amino acid substitutions at D1328 and S355 (e.g., D1328C and S355C); (b) substitutions at the C80 and/or the C574 positions (e.g., C80S and/or C574S); and (c) substitutions at the D10 and/or the H840 positions (e.g., D10A and/or H840A)(or any of the above described positions that can reduce RuvC and/or HNH cleavage activity).

[0171] Likewise, in some cases, a subject reporter Cas9 protein includes one signal partner positioned at an amino acid position corresponding to D1328 of the amino acid sequence set forth in SEQ ID NO: 2 and another signal partner positioned at an amino acid position corresponding to S355 of the amino acid sequence set forth in SEQ ID NO: 2.

### On-Target Nucleic Acid Binding

[0172] The HNH domain of Cas9 protein exhibits a conformational change when a Cas9 complex (which includes the Cas9 protein bound to a Cas9 guide RNA) binds to an appropriate target nucleic acid (e.g., target DNA molecule). The change is exhibited only when the Cas9 complex binds to a target nucleic acid (e.g., DNA, RNA, single stranded DNA, single stranded RNA, double stranded DNA, double stranded RNA) with an appropriate target sequence (e.g., the guide sequence of the Cas9 guide RNA hybridizes on-target to the target sequence of the target nucleic acid). Such a conformational change exhibited by a Cas9 protein is referred to herein as an “on-target” conformational change (i.e., the change occurs upon on-target nucleic acid binding). The Cas9 protein does bind in some instances to off-target sites (i.e., in some cases when a guide sequence is an imperfect match with a target sequence). An “on-target nucleic acid biding” conformational change is not exhibited by a Cas9 protein when the Cas9 complex binds off-target (i.e., the change occurs upon on-target nucleic acid binding, but does not occur upon off-target nucleic acid binding).

[0173] In some cases, on-target binding refers only to cases where the guide sequence of the Cas9 guide RNA has 100% complementarity (no mismatches) with the target sequence of the target nucleic acid. In some cases, on-target binding refers cases where the guide sequence of the Cas9 guide RNA has 5 or less mismatches (e.g., 4 or less, 3 or less, 2 or less, or 1 or less mismatches) with the target sequence of the target nucleic acid.

[0174] An on-target binding conformational change can be monitored using a subject reporter Cas9 protein for various applications. For example, such a reporter Cas9 protein can be used to visualize (e.g., image) Cas9 on-target binding events but to ignore off-target binding. For example, a Cas9 protein can be fused to a reporter moiety such as a fluorescent protein (e.g., GFP), and such a protein exhibits a signal regardless of whether the protein is bound on-target to a target nucleic acid, bound to guide RNA, bound to an incorrect target nucleic acid, free in the cystosol or nucleus of the cells, etc. In some cases, such signal can be considered to be “noise,” e.g., when it is desirable to focus on on-target binding events (“signal”). Thus, the subject compositions and methods can be used to increase signal to noise ratio where the signal is on-target binding of a Cas9 complex (which includes a Cas9 protein and a Cas9 guide RNA) and noise is anything else (e.g., off-target binding).

[0175] Applications of a reporter Cas9 protein that exhibits a change in detectable signal after undergoing a conformational change due to on-target binding include detection of on-target biding events in living or dead cells (e.g., in living or dead eukaryotic cells). In some cases, such a protein can be used to determine if a given target nucleic acid contains a target sequence that matches the guide sequence of the Cas9 guide RNA. For example, a change in signal would be detected (low-to-high or high-to-low depending on the configuration of the reporter Cas9 protein) when the reporter Cas9 protein is contacted (as part of a complex with an appropriate Cas9 guide RNA) with a target nucleic acid having the target sequence but a change in signal would not be detected if the target nucleic acid lacked the target sequence. Such a method could be used in vitro outside of a cell (living or dead), in vitro inside of a cell (living or dead), ex vivo in a cell (living or dead), or in vivo. Such a method could be used for SNP detection, for genotyping (detection of a particular mutation, e.g., a disease-associated mutation, detection of a chromosome abnormality, e.g., translocation, e.g., for cancer detection, etc.).

[0176] In some cases, off-target/unbound Cas9 can be detected simulataneously with on-target Cas9. For example, a subject reporter Cas9 protein can include a label moiety (e.g., a GFP) that is independent of the conformational change of interest and therefore exhibits a first signal that allows the user to monitor all forms of Cas9; while a signal pair of the reporter Cas9 protein, which pair exhibits a change in signal upon the conformational change, elicits a second signal that is distinguishable from the first signal. In some cases, a reporter Cas9 protein can elicit 3 distinguishable signals, a first signal that is elicited by a first signal pair that is associated with an on-target conformational change, a second signal that is elicited by a second signal pair that is associated with a Cas9 guide RNA binding conformational change, and a third signal that is independent of the conformational change of interest; where all three signals are distinguishable from one another.

[0177] In some cases, a residue pair is selected such that one member (the dynamic member) of the residue pair is positioned in the HNH domain (e.g., at the amino acid position corresponding to S867 of the amino acid sequence set forth in SEQ ID NO: 2) of the variant Cas9 protein and the other member (the static member) is positioned (a) in the RuvC domain (e.g., at the amino acid position corresponding to N1054 of the amino acid sequence set forth in SEQ ID NO: 2) (close-to-far conformational change upon binding), or (b) in the alpha-helical lobe (e.g., at the amino acid position corresponding to S355 of the amino acid sequence set forth in SEQ ID NO: 2) (far-to-close conformational change upon binding). Thus, in some cases, a signal pair of a subject reporter Cas9 protein is positioned such that one partner (the dynamic partner) of the signal pair is positioned in the HNH domain (e.g., at the amino acid position corresponding to S867 of the amino acid sequence set forth in SEQ ID NO: 2) of the reporter Cas9 protein and the other partner (the static partner) is positioned (a) in the RuvC domain (e.g., at the amino acid position corresponding to N1054 of the amino acid sequence set forth in SEQ ID NO: 2) (close-to-far conformational change upon binding), or (b) in the alpha-helical lobe (e.g., at the amino acid position corresponding to S355 of the amino acid sequence set forth in SEQ ID NO: 2) (far-to-close conformational change upon binding). Likewise, in some cases, a cysteine pair of a subject variant Cas9 protein is positioned such that one cysteine (the dynamic cysteine) of the cysteine pair is positioned in the HNH domain (e.g., at the amino acid position corresponding to S867 of the amino acid sequence set forth in SEQ ID NO: 2) of the variant Cas9 protein and the other cysteine (the static cysteine) is positioned (a) in the RuvC domain (e.g., at the amino acid position corresponding to N1054 of the amino acid sequence set forth in SEQ ID NO: 2) (close-to-far conformational change upon binding), or (b) in the alpha-helical lobe (e.g., at the amino acid position corresponding to S355 of the amino acid sequence set forth in SEQ ID NO: 2) (far-to-close conformational change upon binding). See Table 3 for examples.

[0178] In some cases, a residue pair is selected such that one member (the dynamic member) of the residue pair is positioned in the Helical-II domain (which is located at amino acid positions 167-307 of the S. pyogenes Cas9 set forth in SEQ ID NO: 2)(e.g., at the amino acid position corresponding to D273 of the amino acid sequence set forth in SEQ ID NO: 2) of the variant Cas9 protein and the other member (the static member) is positioned in the Arg domain (e.g., at the amino acid position corresponding to E60 of the amino acid sequence set forth in SEQ ID NO: 2) (close-to-far conformational change upon binding). Thus, in some cases, a signal pair of a subject reporter Cas9 protein is positioned such that one partner (the dynamic partner) of the signal pair is positioned in the Helical-II domain (e.g., at the amino acid position corresponding to D273 of the amino acid sequence set forth in SEQ ID NO: 2) of the reporter Cas9 protein and the other partner (the static partner) is positioned in the Arg domain (e.g., at the amino acid position corresponding to E60 of the amino acid sequence set forth in SEQ ID NO: 2) (close-to-far conformational change upon binding). Likewise, in some cases, a cysteine pair of a subject variant Cas9 protein is positioned such that one cysteine (the dynamic cysteine) of the cysteine pair is positioned in the Helical-II domain (e.g., at the amino acid position corresponding to D273 of the amino acid sequence set forth in SEQ ID NO: 2) of the variant Cas9 protein and the other cysteine (the static cysteine) is positioned in the Arg domain (e.g., at the amino acid position corresponding to E60 of the amino acid sequence set forth in SEQ ID NO: 2) (close-to-far conformational change upon binding). See Table 3 for examples.

[0179] In some cases, a residue pair is selected such that one member (the dynamic member) of the residue pair is positioned in the Helical-III domain (which is located at amino acid positions 497-713 of the S. pyogenes Cas9 set forth in SEQ ID NO: 2) (e.g., at the amino acid position corresponding to S701 of the amino acid sequence set forth in SEQ ID NO: 2) of the variant Cas9 protein and the other member (the static member) is positioned in the RuvC domain (e.g., at the amino acid position corresponding to S960 of the amino acid sequence set forth in SEQ ID NO: 2) (close-to-far conformational change upon binding). Thus, in some cases, a signal pair of a subject reporter Cas9 protein is positioned such that one partner (the dynamic partner) of the signal pair is positioned in the Helical-III domain (e.g., at the amino acid position corresponding to S701 of the amino acid sequence set forth in SEQ ID NO: 2) of the reporter Cas9 protein and the other partner (the static partner) is positioned in the RuvC domain (e.g., at the amino acid position corresponding to S960 of the amino acid sequence set forth in SEQ ID NO: 2) (close-to-far conformational change upon binding). Likewise, in some cases, a cysteine pair of a subject variant Cas9 protein is positioned such that one cysteine (the dynamic cysteine) of the cysteine pair is positioned in the Helical-III domain (e.g., at the amino acid position corresponding to S701 of the amino acid sequence set forth in SEQ ID NO: 2) of the variant Cas9 protein and the other cysteine (the static cysteine) is positioned in the RuvC domain (e.g., at the amino acid position corresponding to S960 of the amino acid sequence set forth in SEQ ID NO: 2) (close-to-far conformational change upon binding). See Table 3 for examples.

### S867 and N1054 (Close to Far) (see FIG. 8A-8B)

[0180] An example of a residue pair (and thus a cysteine pair and/or a signal pair) in which the members are in close proximity (close) prior to on-target nucleic acid binding, and are separated (far) subsequent to binding (and can therefore be used for a high-to-low FRET signaling pair or alternatively for low-to-high signal quenching pair) is S867 (dynamic, HNH domain) and N1054 (static, RuvC domain), as numbered according to the wild type S. pyogenes Cas9 amino acid sequence set forth in SEQ ID NO: 2, or the corresponding amino acid position(s) in a corresponding wild type Cas9 protein.

[0181] Thus, in some cases, a subject variant Cas9 protein includes a cysteine at each of positions S867 and N1054 (e.g., the variant Cas9 protein can include S867C and N1054C mutations). In some cases (e.g., as described above), the variant Cas9 protein also includes substitutions at the C80 and/or the C574 positions (e.g., C80S and/or C574S). In some cases (e.g., as described above), the variant Cas9 protein also includes (a) substitutions at the C80 and/or the C574 positions (e.g., C80S and/or C574S) and/or (b) one or more mutations that render the variant Cas9 protein a variant nickase Cas9 protein or a variant dCas9 protein. As an illustrative example, in some cases, a subject variant Cas9 protein includes (a) amino acid substitutions at S867 and N1054 (e.g., S867C and N1054C); (b) substitutions at the C80 and/or the C574 positions (e.g., C80S and/or C574S); and (c) substitutions at the D10 and/or the H840 positions (e.g., D10A and/or H840A) (or any of the above described positions that can reduce RuvC and/or HNH cleavage activity). An example of such a variant Cas9 protein that can cleave a double stranded target nucleic acid is set forth as SEQ ID NO: 1625. An example of such a variant Cas9 protein that is a dCas9 protein is set forth as SEQ ID NO: 1626.

[0182] Likewise, in some cases, a subject reporter Cas9 protein includes one signal partner positioned at an amino acid position corresponding to S867 of the amino acid sequence set forth in SEQ ID NO: 2 and another signal partner positioned at an amino acid position corresponding to N1054 of the amino acid sequence set forth in SEQ ID NO: 2.

### E60 and D273 (Close to Far) (see FIG. 9A-9D)

[0183] An example of a residue pair (and thus a cysteine pair and/or a signal pair) in which the members are in close proximity (close) prior to on-target nucleic acid binding, and are separated (far) subsequent to binding (and can therefore be used for a high-to-low FRET signaling pair or alternatively for low-to-high signal quenching pair) is E60 (static, Arg domain) and D273 (dynamic, Helical-II domain), as numbered according to the wild type S. pyogenes Cas9 amino acid sequence set forth in SEQ ID NO: 2, or the corresponding amino acid position(s) in a corresponding wild type Cas9 protein.

[0184] Thus, in some cases, a subject variant Cas9 protein includes a cysteine at each of positions E60 and D273 (e.g., the variant Cas9 protein can include E60C and D273C mutations). In some cases (e.g., as described above), the variant Cas9 protein also includes substitutions at the C80 and/or the C574 positions (e.g., C80S and/or C574S). In some cases (e.g., as described above), the variant Cas9 protein also includes (a) substitutions at the C80 and/or the C574 positions (e.g., C80S and/or C574S) and/or (b) one or more mutations that render the variant Cas9 protein a variant nickase Cas9 protein or a variant dCas9 protein. As an illustrative example, in some cases, a subject variant Cas9 protein includes (a) amino acid substitutions at E60 and D273 (e.g., E60C and D273C); (b) substitutions at the C80 and/or the C574 positions (e.g., C80S and/or C574S); and (c) substitutions at the D10 and/or the H840 positions (e.g., D10A and/or H840A) (or any of the above described positions that can reduce RuvC and/or HNH cleavage activity). An example of such a variant Cas9 protein that can cleave a double stranded target nucleic acid is set forth as SEQ ID NO: 1627. An example of such a variant Cas9 protein that is a dCas9 protein is set forth as SEQ ID NO: 1628.

Likewise, in some cases, a subject reporter Cas9 protein includes one signal partner positioned at an amino acid position corresponding to E60 of the amino acid sequence set forth in SEQ ID NO: 2 and another signal partner positioned at an amino acid position corresponding to D273 of the amino acid sequence set forth in SEQ ID NO: 2.

### S960 and S701 (Close to Far) (see FIG. 10A-10F)

[0185] An example of a residue pair (and thus a cysteine pair and/or a signal pair) in which the members are in close proximity (close) prior to on-target nucleic acid binding, and are separated (far) subsequent to binding (and can therefore be used for a high-to-low FRET signaling pair or alternatively for low-to-high signal quenching pair) is S960 (static, RuvC domain, RuvC-III) and S701 (dynamic, Helical-III domain), as numbered according to the wild type S. pyogenes Cas9 amino acid sequence set forth in SEQ ID NO: 2, or the corresponding amino acid position(s) in a corresponding wild type Cas9 protein.

[0186] Thus, in some cases, a subject variant Cas9 protein includes a cysteine at each of positions S960 and S701 (e.g., the variant Cas9 protein can include S960C and S701C mutations). In some cases (e.g., as described above), the variant Cas9 protein also includes substitutions at the C80 and/or the C574 positions (e.g., C80S and/or C574S). In some cases (e.g., as described above), the variant Cas9 protein also includes (a) substitutions at the C80 and/or the C574 positions (e.g., C80S and/or C574S) and/or (b) one or more mutations that render the variant Cas9 protein a variant nickase Cas9 protein or a variant dCas9 protein. As an illustrative example, in some cases, a subject variant Cas9 protein includes (a) amino acid substitutions at S960 and S701 (e.g., S960C and S701C); (b) substitutions at the C80 and/or the C574 positions (e.g., C80S and/or C574S); and (c) substitutions at the D10 and/or the H840 positions (e.g., D10A and/or H840A) (or any of the above described positions that can reduce RuvC and/or HNH cleavage activity). An example of such a variant Cas9 protein that can cleave a double stranded target nucleic acid is set forth as SEQ ID NO: 1629. An example of such a variant Cas9 protein that is a dCas9 protein is set forth as SEQ ID NO: 1630. Likewise, in some cases, a subject reporter Cas9 protein includes one signal partner positioned at an amino acid position corresponding to S960 of the amino acid sequence set forth in SEQ ID NO: 2 and another signal partner positioned at an amino acid position corresponding to S701 of the amino acid sequence set forth in SEQ ID NO: 2.

### S355 and S867 (Far to Close) (see FIG. 7A-7B)

[0187] An example of a residue pair (and thus a cysteine pair and/or a signal pair) in which the members are separated (far) prior to on-target nucleic acid binding, and are in close proximity (close) subsequent to binding (and can therefore be used for a low-to-high FRET signaling pair or alternatively for high-to-low signal quenching pair) is S355 (static, alpha helical lobe) and S867 (dynamic, HNH domain); as numbered according to the wild type S. pyogenes Cas9 amino acid sequence set forth in SEQ ID NO: 2, or the corresponding amino acid position(s) in a corresponding wild type Cas9 protein.

[0188] Thus, in some cases, a subject variant Cas9 protein includes a cysteine at each of positions S355 and S867 (e.g., the variant Cas9 protein can include S355C and S867C mutations). In some cases (e.g., as described above), the variant Cas9 protein also includes substitutions at the C80 and/or the C574 positions (e.g., C80S and/or C574S). In some cases (e.g., as described above), the variant Cas9 protein also includes (a) substitutions at the C80 and/or the C574 positions (e.g., C80S and/or C574S) and/or (b) one or more mutations that render the variant Cas9 protein a variant nickase Cas9 protein or a variant dCas9 protein. As an illustrative example, in some cases, a subject variant Cas9 protein includes (a) amino acid substitutions at S355 and S867 (e.g., S355C and S867C); (b) substitutions at the C80 and/or the C574 positions (e.g., C80S and/or C574S); and (c) substitutions at the D10 and/or the H840 positions (e.g., D10A and/or H840A) (or any of the above described positions that can reduce RuvC and/or HNH cleavage activity). An example of such a variant Cas9 protein that can cleave a double stranded target nucleic acid is set forth as SEQ ID NO: 1623. An example of such a variant Cas9 protein that is a dCas9 protein is set forth as SEQ ID NO: 1624.

[0189] Likewise, in some cases, a subject reporter Cas9 protein includes one signal partner positioned at an amino acid position corresponding to S355 of the amino acid sequence set forth in SEQ ID NO: 2 and another signal partner positioned at an amino acid position corresponding to S867 of the amino acid sequence set forth in SEQ ID NO: 2.

[0190] For the descriptions below (e.g., for chimeric variant Cas9 proteins, e.g., variant Cas9 proteins with a fusion partner; for heterodimeric Cas9 proteins; for Cas9 guide RNAs; for PAMmers; for donor polypeptides; for nucleic acids; for vectors; for host cells; for non-human genetically modified organisms; etc.), when the term “Cas9 protein” or “Cas9 polypeptide” is used, the description generally refers to any form of a subject variant Cas9 (e.g., a subject reporter Cas9 protein, a chimeric reporter Cas9 protein, etc.).

### Fusion Partners/Chimeric Variant Cas9 Proteins

[0191] In some embodiments, a subject variant Cas9 protein is a chimeric Cas9 protein (also referred to herein as a fusion protein, e.g., a “Cas9 fusion protein”). A Cas9 fusion protein can bind and/or modify a target nucleic acid (e.g., cleave, methylate, demethylate, etc.). In some cases, a Cas9 fusion protein can modify a polypeptide associated with target nucleic acid (e.g., methylation, acetylation, etc., of, for example, a histone tail). For purposes of this disclosure, a “Cas9 fusion protein” is a subject variant Cas9 protein that is fused to a covalently linked heterologous polypeptide (also referred to as a “fusion partner”). In some cases, the Cas9 protein portion of the chimeric Cas9 protein is a dCas9. In some cases, the Cas9 protein portion of the chimeric Cas9 protein is a nickase Cas9 (e.g., can cleave one strand of a double stranded target nucleic acid, but not the other strand, e.g., has RuvC cleavage activity but not HNH cleavage activity, or has HNH cleavage activity but not RuvC cleavage activity).

[0192] In some cases, the heterologous protein exhibits (and therefore provides for) an activity (e.g., an enzymatic activity) that will also be exhibited by the Cas9 fusion protein (e.g., methyltransferase activity, acetyltransferase activity, kinase activity, ubiquitinating activity, etc.). When describing fusion partners, it is to be understood that fusion to the Cas9 protein can include fusion of an entire protein (an entire fusion partner protein) (e.g., an entire transcription activator or repressor protein); or can include fusion of a particular region and/or domain of the fusion partner to the Cas9 protein (e.g., fusion of a transcription activator or repressor domain from a fusion partner).

[0193] In some cases, the heterologous sequence provides for subcellular localization, i.e., the heterologous sequence is a subcellular localization sequence (e.g., a nuclear localization signal (NLS) for targeting to the nucleus, a sequence to keep the fusion protein out of the nucleus, e.g., a nuclear export sequence (NES), a sequence to keep the fusion protein retained in the cytoplasm, a mitochondrial localization signal for targeting to the mitochondria, a chloroplast localization signal for targeting to a chloroplast, an ER retention signal, and the like). In some embodiments, a Cas9 protein does not include a NLS so that the protein is not targeted to the nucleus (which can be advantageous, e.g., when the target nucleic acid is an RNA that is present in the cytosol). In some embodiments, the heterologous sequence can provide a tag (i.e., the heterologous sequence is a detectable label) for ease of tracking and/or purification (e.g., a fluorescent protein, e.g., green fluorescent protein (GFP), YFP, RFP, CFP, mCherry, tdTomato, and the like; a histidine tag, e.g., a His tag (e.g., 6×His, 10×His, etc.); a hemagglutinin (HA) tag; a FLAG tag; a Myc tag; maltose binding protein (MBP), and the like). In some embodiments, the heterologous sequence can provide for increased or decreased stability (i.e., the heterologous sequence is a stability control peptide, e.g., a degron, which in some cases is controllable (e.g., a temperature sensitive or drug controllable degron sequence, see below). In some embodiments, the heterologous sequence can provide for increased or decreased transcription from the target nucleic acid (i.e., the heterologous sequence is a transcription modulation sequence, e.g., a transcription factor/activator or a fragment thereof, a protein or fragment thereof that recruits a transcription factor/activator, a transcription repressor or a fragment thereof, a protein or fragment thereof that recruits a transcription repressor, a small molecule/drug-responsive transcription regulator, etc.). In some embodiments, the heterologous sequence can provide a binding domain (i.e., the heterologous sequence is a protein binding sequence, e.g., to provide the ability of a subject Cas9 fusion protein to bind to another protein of interest, e.g., a DNA or histone modifying protein, a transcription factor or transcription repressor, a recruiting protein, an RNA modification enzyme, an RNA-binding protein, a translation initiation factor, an RNA splicing factor, etc.). A heterologous nucleic acid sequence may be linked to another nucleic acid sequence (e.g., by genetic engineering) to generate a chimeric nucleotide sequence encoding a chimeric polypeptide.

[0194] A subject Cas9 fusion polypeptide (Cas9 fusion protein) can have multiple (1 or more, 2 or more, 3 or more, 4 or more, 5 or more, 6 or more, etc.) fusion partners in any combination of the above. As an illustrative example, a Cas9 fusion protein can have a heterologous sequence that provides an activity (e.g., for transcription modulation, target modification, modification of a protein associated with a target nucleic acid, etc.) and can also have a subcellular localization sequence (e.g., 1 or more NLSs). In some cases, such a Cas9 fusion protein might also have a tag for ease of tracking and/or purification (e.g., green fluorescent protein (GFP), YFP, RFP, CFP, mCherry, tdTomato, and the like; a histidine tag, e.g., a 6×His tag; a hemagglutinin (HA) tag; a FLAG tag; a Myc tag; and the like). As another illustrative example, a Cas9 protein can have one or more NLSs (e.g., two or more, three or more, four or more, five or more, 1, 2, 3, 4, or 5 NLSs). In some cases a fusion partner (or multiple fusion partners) (e.g., an NLS, a tag, a fusion partner providing an activity, etc.) is located at or near the C-terminus of Cas9. In some cases a fusion partner (or multiple fusion partners) (e.g., an NLS, a tag, a fusion partner providing an activity, etc.) is located at the N-terminus of Cas9. In some cases a Cas9 has a fusion partner (or multiple fusion partners)(e.g., an NLS, a tag, a fusion partner providing an activity, etc.) at both the N-terminus and C-terminus.

[0195] Suitable fusion partners that provide for increased or decreased stability include, but are not limited to degron sequences. Degrons are readily understood by one of ordinary skill in the art to be amino acid sequences that control the stability of the protein of which they are part. For example, the stability of a protein comprising a degron sequence is controlled in part by the degron sequence. In some cases, a suitable degron is constitutive such that the degron exerts its influence on protein stability independent of experimental control (i.e., the degron is not drug inducible, temperature inducible, etc.) In some cases, the degron provides the variant Cas9 protein with controllable stability such that the variant Cas9 protein can be turned “on” (i.e., stable) or “off” (i.e., unstable, degraded) depending on the desired conditions. For example, if the degron is a temperature sensitive degron, the variant Cas9 protein may be functional (i.e., “on”, stable) below a threshold temperature (e.g., 42° C., 41° C., 40° C., 39° C., 38° C., 37° C., 36° C., 35° C., 34° C., 33° C., 32° C., 31° C., 30° C., etc.) but non-functional (i.e., “off”, degraded) above the threshold temperature. As another example, if the degron is a drug inducible degron, the presence or absence of drug can switch the protein from an “off” (i.e., unstable) state to an “on” (i.e., stable) state or vice versa. An exemplary drug inducible degron is derived from the FKBP12 protein. The stability of the degron is controlled by the presence or absence of a small molecule that binds to the degron.

[0196] Examples of suitable degrons include, but are not limited to those degrons controlled by Shield-1, DHFR, auxins, and/or temperature. Non-limiting examples of suitable degrons are known in the art (e.g., Dohmen et al., Science, 1994. 263(5151): p. 1273-1276: Heat-inducible degron: a method for constructing temperature-sensitive mutants; Schoeber et al., Am J Physiol Renal Physiol. 2009 January; 296(1):F204-11: Conditional fast expression and function of multimeric TRPV5 channels using Shield-1; Chu et al., Bioorg Med Chem Lett. 2008 Nov. 15; 18(22):5941-4: Recent progress with FKBP-derived destabilizing domains; Kanemaki, Pflugers Arch. 2012 Dec. 28: Frontiers of protein expression control with conditional degrons; Yang et al., Mol Cell. 2012 Nov. 30; 48(4):487-8: Titivated for destruction: the methyl degron; Barbour et al., Biosci Rep. 2013 Jan. 18; 33(1).: Characterization of the bipartite degron that regulates ubiquitin-independent degradation of thymidylate synthase; and Greussing et al., J Vis Exp. 2012 Nov. 10; (69): Monitoring of ubiquitin-proteasome activity in living cells using a Degron (dgn)-destabilized green fluorescent protein (GFP)-based reporter protein; all of which are hereby incorporated in their entirety by reference).

[0197] Exemplary degron sequences have been well-characterized and tested in both cells and animals Thus, fusing a Cas9 protein (e.g., a subject variant Cas9 protein) to a degron sequence produces a “tunable” and “inducible” Cas9 protein. Any of the fusion partners described herein can be used in any desirable combination. As one non-limiting example to illustrate this point, a Cas9 fusion protein (i.e., a chimeric Cas9 protein) can comprise a YFP sequence for detection, a degron sequence for stability, and transcription activator sequence to increase transcription of the target nucleic acid. A suitable reporter protein for use as a fusion partner for a Cas9 protein (e.g., wild type Cas9, variant Cas9, variant Cas9 with reduced nuclease function, etc.), includes, but is not limited to, the following exemplary proteins (or functional fragment thereof): his3, β-galactosidase, a fluorescent protein (e.g., GFP, RFP, YFP, cherry, tomato, etc., and various derivatives thereof), luciferase, β-glucuronidase, and alkaline phosphatase. Furthermore, the number of fusion partners that can be used in a Cas9 fusion protein is unlimited. In some cases, a Cas9 fusion protein comprises one or more (e.g. two or more, three or more, four or more, or five or more) heterologous sequences.

[0198] Suitable fusion partners include, but are not limited to, a polypeptide that provides for methyltransferase activity, demethylase activity, acetyltransferase activity, deacetylase activity, kinase activity, phosphatase activity, ubiquitin ligase activity, deubiquitinating activity, adenylation activity, deadenylation activity, SUMOylating activity, deSUMOylating activity, ribosylation activity, deribosylation activity, myristoylation activity, or demyristoylation activity, any of which can be directed at modifying nucleic acid directly (e.g., methylation of DNA or RNA) or at modifying a nucleic acid-associated polypeptide (e.g., a histone, a DNA binding protein, and RNA binding protein, and the like). Further suitable fusion partners include, but are not limited to boundary elements (e.g., CTCF), proteins and fragments thereof that provide periphery recruitment (e.g., Lamin A, Lamin B, etc.), and protein docking elements (e.g., FKBP/FRB, Pil1/Aby1, etc.).

[0199] Examples of various additional suitable fusion partners (or fragments thereof) for a subject variant Cas9 protein include, but are not limited to those described in the PCT patent applications: WO2010075303, WO2012068627, and WO2013155555 which are hereby incorporated by reference in their entirety.

[0200] Suitable fusion partners include, but are not limited to, a polypeptide that provides an activity that indirectly increases transcription by acting directly on the target nucleic acid or on a polypeptide (e.g., a histone, a DNA-binding protein, an RNA-binding protein, an RNA editing protein, etc.) associated with the target nucleic acid. Suitable fusion partners include, but are not limited to, a polypeptide that provides for methyltransferase activity, demethylase activity, acetyltransferase activity, deacetylase activity, kinase activity, phosphatase activity, ubiquitin ligase activity, deubiquitinating activity, adenylation activity, deadenylation activity, SUMOylating activity, deSUMOylating activity, ribosylation activity, deribosylation activity, myristoylation activity, or demyristoylation activity.

[0201] Additional suitable fusion partners include, but are not limited to, a polypeptide that directly provides for increased transcription and/or translation of a target nucleic acid (e.g., a transcription activator or a fragment thereof, a protein or fragment thereof that recruits a transcription activator, a small molecule/drug-responsive transcription and/or translation regulator, a translation-regulating protein, etc.).

[0202] Examples of fusion partners to accomplish increased or decreased transcription include, but are not limited to: (e.g., GAL4, VP16, VP64, the Krüppel associated box (KRAB or SKD); the Mad mSIN3 interaction domain (SID); the ERF repressor domain (ERD), etc.). In some such cases, a Cas9 fusion protein is targeted by the Cas9 guide RNA to a specific location (i.e., sequence) in the target nucleic acid and exerts locus-specific regulation such as blocking RNA polymerase binding to a promoter (which selectively inhibits transcription activator function), increasing transcription, and/or modifying the local chromatin status (e.g., when a fusion sequence is used that modifies the target nucleic acid or modifies a polypeptide associated with the target nucleic acid). In some cases, the changes are transient (e.g., transcription repression or activation). In some cases, the changes are inheritable (e.g., when epigenetic modifications are made to the target nucleic acid or to proteins associated with the target nucleic acid, e.g., nucleosomal histones).

[0203] Non-limiting examples of fusion partners for use when targeting ssRNA target nucleic acids include (but are not limited to): splicing factors (e.g., RS domains); protein translation components (e.g., translation initiation, elongation, and/or release factors; e.g., eIF4G); RNA methylases; RNA editing enzymes (e.g., RNA deaminases, e.g., adenosine deaminase acting on RNA (ADAR), including A to I and/or C to U editing enzymes); helicases; RNA-binding proteins; and the like. It is understood that a fusion partner can include the entire protein or in some cases can include a fragment of the protein (e.g., a functional domain).

[0204] In some embodiments, the heterologous sequence can be fused to the C-terminus of the Cas9 protein. In some embodiments, the heterologous sequence can be fused to the N-terminus of the Cas9 protein. In some embodiments, the heterologous sequence can be fused to an internal portion (i.e., a portion other than the N- or C-terminus) of the Cas9 protein.

[0205] In addition, the fusion partner of a Cas9 fusion protein can be any domain capable of interacting with ssRNA (which, for the purposes of this disclosure, includes intramolecular and/or intermolecular secondary structures, e.g., double-stranded RNA duplexes such as hairpins, stem-loops, etc.), whether transiently or irreversibly, directly or indirectly, including but not limited to an effector domain selected from the group comprising; Endonucleases (for example RNase III, the CRR22 DYW domain, Dicer, and PIN (PilT N-terminus) domains from proteins such as SMG5 and SMG6); proteins and protein domains responsible for stimulating RNA cleavage (for example CPSF, CstF, CFIm and CFIIm); Exonucleases (for example XRN-1 or Exonuclease T); Deadenylases (for example HNT3); proteins and protein domains responsible for nonsense mediated RNA decay (for example UPF1, UPF2, UPF3, UPF3b, RNP S1, Y14, DEK, REF2, and SRm160); proteins and protein domains responsible for stabilizing RNA (for example PABP); proteins and protein domains responsible for repressing translation (for example Ago2 and Ago4); proteins and protein domains responsible for stimulating translation (for example Staufen); proteins and protein domains responsible for (e.g., capable of) modulating translation (e.g., translation factors such as initiation factors, elongation factors, release factors, etc., e.g., eIF4G); proteins and protein domains responsible for polyadenylation of RNA (for example PAP1, GLD-2, and Star-PAP); proteins and protein domains responsible for polyuridinylation of RNA (for example CI D1 and terminal uridylate transferase); proteins and protein domains responsible for RNA localization (for example from IMP1, ZBP1, She2p, She3p, and Bicaudal-D); proteins and protein domains responsible for nuclear retention of RNA (for example Rrp6); proteins and protein domains responsible for nuclear export of RNA (for example TAP, NXF1, THO, TREX, REF, and Aly); proteins and protein domains responsible for repression of RNA splicing (for example PTB, Sam68, and hnRNP A1); proteins and protein domains responsible for stimulation of RNA splicing (for example Serine/Arginine-rich (SR) domains); proteins and protein domains responsible for reducing the efficiency of transcription (for example FUS (TLS)); and proteins and protein domains responsible for stimulating transcription (for example CDK7 and HIV Tat). Alternatively, the effector domain may be selected from the group comprising Endonucleases; proteins and protein domains capable of stimulating RNA cleavage; Exonucleases; Deadenylases; proteins and protein domains having nonsense mediated RNA decay activity; proteins and protein domains capable of stabilizing RNA; proteins and protein domains capable of repressing translation; proteins and protein domains capable of stimulating translation; proteins and protein domains capable of modulating translation (e.g., translation factors such as initiation factors, elongation factors, release factors, etc., e.g., eIF4G); proteins and protein domains capable of polyadenylation of RNA; proteins and protein domains capable of polyuridinylation of RNA; proteins and protein domains having RNA localization activity; proteins and protein domains capable of nuclear retention of RNA; proteins and protein domains having RNA nuclear export activity; proteins and protein domains capable of repression of RNA splicing; proteins and protein domains capable of stimulation of RNA splicing; proteins and protein domains capable of reducing the efficiency of transcription; and proteins and protein domains capable of stimulating transcription. Another suitable fusion partner is a PUF RNA-binding domain, which is described in more detail in WO2012068627.

[0206] Some RNA splicing factors that can be used (in whole or as fragments thereof) as fusion partners for a Cas9 polypeptide have modular organization, with separate sequence-specific RNA binding modules and splicing effector domains. For example, members of the Serine/Arginine-rich (SR) protein family contain N-terminal RNA recognition motifs (RRMs) that bind to exonic splicing enhancers (ESEs) in pre-mRNAs and C-terminal RS domains that promote exon inclusion. As another example, the hnRNP protein hnRNP Al binds to exonic splicing silencers (ESSs) through its RRM domains and inhibits exon inclusion through a C-terminal Glycine-rich domain. Some splicing factors can regulate alternative use of splice site (ss) by binding to regulatory sequences between the two alternative sites. For example, ASF/SF2 can recognize ESEs and promote the use of intron proximal sites, whereas hnRNP Al can bind to ESSs and shift splicing towards the use of intron distal sites. One application for such factors is to generate ESFs that modulate alternative splicing of endogenous genes, particularly disease associated genes. For example, Bcl-x pre-mRNA produces two splicing isoforms with two alternative 5′ splice sites to encode proteins of opposite functions. The long splicing isoform Bcl-xL is a potent apoptosis inhibitor expressed in long-lived post mitotic cells and is up-regulated in many cancer cells, protecting cells against apoptotic signals. The short isoform Bcl-xS is a pro-apoptotic isoform and expressed at high levels in cells with a high turnover rate (e.g., developing lymphocytes). The ratio of the two Bcl-x splicing isoforms is regulated by multiple c\acute{ω}-elements that are located in either the core exon region or the exon extension region (i.e., between the two alternative 5′ splice sites). For more examples, see WO2010075303.

[0207] In some embodiments, a subject variant Cas9 protein can be linked to a heterologous polypeptide (a heterologous amino acid sequence) via a linker polypeptide (e.g., one or more linker polypeptides). As non-limiting examples, a linker polypeptide can be interposed between any of: (a) a heterologous polypeptide and an N-terminal region of a variant Cas9 protein (which would place the heterologous polypeptide at or near the N-terminus of the variant Cas9 protein; (b) a heterologous polypeptide and a C-terminal region of a variant Cas9 protein (which would place the heterologous polypeptide at or near the C-terminus of the variant Cas9 protein; (c) a heterologous polypeptide and a region of the variant Cas9 protein that is N-terminal to the HNH domain (which would place the heterologous polypeptide at or near N-terminal region of the HNH-domain); (d) a heterologous polypeptide and a region of the variant Cas9 protein that is C-terminal to the HNH domain (which would place the fusion partner at or near C-terminal region of the HNH-domain); (e) a heterologous polypeptide and a region of the HNH domain (which would place the heterologous polypeptide within the HNH domain) In some cases, a linker polypeptide is positioned between the heterologous polypeptide and a subject variant Cas9 protein at both the N- and C-terminal ends of the heterologous polypeptide (e.g., if the heterologous polypeptide is inserted within a subject variant Cas9 protein, in which case there may be no linker polypeptides, one linker polypeptide, or two linker polypeptides between the heterologous polypeptide and the variant Cas9 protein).

[0208] The linker polypeptide may have any of a variety of amino acid sequences. Proteins can be joined by a spacer peptide, generally of a flexible nature, although other chemical linkages are not excluded. Suitable linkers include polypeptides of between about 6 amino acids and about 40 amino acids in length, or between about 6 amino acids and about 25 amino acids in length. These linkers are generally produced by using synthetic, linker-encoding oligonucleotides to couple the proteins. Peptide linkers with a degree of flexibility will generally be preferred. The linking peptides may have virtually any amino acid sequence, bearing in mind that the preferred linkers will have a sequence that results in a generally flexible peptide. The use of small amino acids, such as glycine and alanine, are of use in creating a flexible peptide. The creation of such sequences is routine to those of skill in the art. A variety of different linkers are commercially available and are considered suitable for use.

[0209] Exemplary linker polypeptides include glycine polymers (G)ₙ, glycine-serine polymers (including, for example, (GS)ₙ, GSGGSₙ (SEQ ID NO: 1548), GGSGGSₙ (SEQ ID NO: 1620), and GGGSₙ (SEQ ID NO: 1549), where n is an integer of at least one), glycine-alanine polymers, alanine-serine polymers. Exemplary linkers can comprise amino acid sequences including, but not limited to, GGSG (SEQ ID NO: 1550), GGSGG (SEQ ID NO: 1551), GSGSG (SEQ ID NO: 1552), GSGGG (SEQ ID NO: 1553), GGGSG (SEQ ID NO: 1554), GSSSG (SEQ ID NO: 1555), and the like. The ordinarily skilled artisan will recognize that design of a peptide conjugated to any elements described above can include linkers that are all or partially flexible, such that the linker can include a flexible linker as well as one or more portions that confer less flexible structure.

### Cas9 Heterodimers

[0210] In some cases, a subject variant Cas9 protein (e.g., as described above, e.g., having a disrupted RuvC/HNH linker region; having a deletion within the HNH domain that reduces the HNH cleavage activity; having an insertion within the HNH domain of a heterologous amino acid sequence; etc.) is also a Cas9 heterodimer. Thus, it is to be understood that the description of various embodiments of Cas9 heterodimers below can also include the features of a subject variant Cas9 protein (e.g., as described above, e.g., having a disrupted RuvC/HNH linker region; having a deletion within the HNH domain that reduces the HNH cleavage activity; having an insertion within the HNH domain of a heterologous amino acid sequence; etc.).

[0211] A Cas9 heterodimer comprises two polypeptides, where the two polypeptides are not covalently linked to one another. A Cas9 heterodimer is also referred to herein as a “heterodimeric Cas9 complex” and/or or a “split Cas9 protein” and/or or a “heterodimeric Cas9 protein.” A Cas9 heterodimer can include a first fusion polypeptide comprising a first polypeptide (e.g., a Cas9 nuclease lobe) covalently linked (directly or via a linker) to a first fusion partner; and a second fusion polypeptide comprising a second polypeptide (e.g., a Cas9 alpha-helical lobe) covalently linked (directly or via a linker) to a second fusion partner. In some cases, the first polypeptide (e.g., a Cas9 nuclease lobe) is circularly permuted (i.e., in some cases, the first polypeptide is a circular permutant).

[0212] A Cas9 heterodimer comprises two polypeptides that can interact to form a complex (i.e., to form the heterodimeric Cas9 protein). A Cas9 heterodimer is also referred to herein as a “split Cas9” or a “split Cas9 protein.” The fusion partners present in the first fusion polypeptide and the second fusion polypeptide can be induced to dimerize (e.g., by a dimerizing agent). When the fusion partners present in the first fusion polypeptide and the second fusion polypeptide dimerize, the first fusion polypeptide and the second fusion polypeptide dimerize. In the absence of a dimerizing agent, and in the absence of a guide RNA that includes a stem loop 2 and/or a stem loop 3, the first fusion polypeptide and the second fusion polypeptide do not dimerize. When the first fusion polypeptide and the second fusion polypeptide dimerize, the Cas9 heterodimer, together with a truncated guide RNA (e.g., a guide RNA that does not include stem loop 2 and/or stem loop 3), can bind a target nucleic acid (an in some cases modify, e.g., cleave or otherwise modify the target nucleic acid). A Cas9 heterodimer and a truncated guide RNA form a “Cas9 heterodimer system,” described herein. A Cas9 heterodimer system can bind to a target nucleic acid. In some cases, a Cas9 heterodimer system can bind to a target nucleic acid and cleave a PAMmer (e.g., a quenched PAMmer) that is hybridized to the target nucleic acid. In some cases, a Cas9 heterodimer system can bind to a target nucleic acid and cleave the target nucleic acid. In some cases, a Cas9 heterodimer system can bind to a target nucleic acid and modify the target nucleic acid. In some cases, a Cas9 heterodimer system can bind to a target nucleic acid and modulate transcription of/from the target nucleic acid.

[0213] A subject Cas9 heterodimer (a split Cas9 protein) includes a first polypeptide (where the first polypeptide includes a Cas9 nuclease lobe) and a second polypeptide (where the second polypeptide includes a Cas9 alpha-helical lobe). A nuclease lobe includes: (i) a RuvC domain, where a RuvC domain comprises a RuvCI polypeptide, a RuvCII polypeptide, and a RuvCIII polypeptide; (ii) an HNH domain (also referred to as an HNH polypeptide); and (iii) a PAM-interacting domain (also referred to as a “PAM-interacting polypeptide”). A nuclease lobe can also include a RuvC/HNH linker region (as described above). In some cases, the RuvC/HNH linker region is disrupted (as described above). A Cas9 alpha-helical lobe is also referred to as an “alpha-helical recognition region.”

[0214] Cas9 Heterodimers with Nuclease Lobe and Alpha-Helical Lobe

[0215] In some cases, a Cas9 heterodimer comprises: A) a first fusion polypeptide comprising: a) a first polypeptide comprising: i) a RuvCI polypeptide; ii) a RuvCII polypeptide; iii) an HNH polypeptide; iv) a RuvCIII polypeptide; and v) a PAM-interacting polypeptide; and b) a first fusion partner, where the first fusion partner is a first member of a dimerization pair; and B) a second fusion polypeptide comprising: a) an alpha-helical recognition region; and b) a second fusion partner, where the second fusion partner is a second member of a dimerization pair.

[0216] First Fusion Polypeptide

[0217] As noted above, in some cases, a Cas9 heterodimer comprises: A) a first fusion polypeptide comprising: a) a first polypeptide comprising: i) a RuvCI polypeptide; ii) a RuvCII polypeptide; iii) an HNH polypeptide; iv) a RuvCIII polypeptide; and v) a PAM-interacting polypeptide; and b) a first fusion partner, where the first fusion partner is a first member of a dimerization pair; and B) a second fusion polypeptide comprising: a) an alpha-helical recognition region; and b) a second fusion partner, where the second fusion partner is a second member of a dimerization pair.

[0218] A RuvCI polypeptide can comprise an amino acid sequence having at least 75%, at least 80%, at least 85%, at least 90%, at least 95%, at least 98%, at least 99%, or 100%, amino acid sequence identity to a contiguous stretch of from 40 amino acids to 60 amino acids of amino acids 1-60 of the S. pyogenes Cas9 amino acid sequence set forth in SEQ ID NO: 1545, or a corresponding segment of a Cas9 polypeptide amino acid sequence set forth in any of SEQ ID NOs: 1-259 and 795-1346; and can have a length of from 40 amino acids to 80 amino acids, e.g., from 40 amino acids to 50 amino acids, from 50 amino acids to 60 amino acids, from 60 amino acids to 70 amino acids, or from 70 amino acids to 80 amino acids. In some cases, a RuvCI polypeptide comprises an amino acid sequence having at least 75%, at least 80%, at least 85%, at least 90%, at least 95%, at least 98%, at least 99%, or 100%, amino acid sequence identity to amino acids 1-60 of the S. pyogenes Cas9 amino acid sequence set forth in SEQ ID NO: 1545, or a corresponding segment of a Cas9 polypeptide amino acid sequence set forth in any of SEQ ID NOs: 1-259 and 795-1346; and has a length of from 50 amino acids to 60 amino acids (e.g., 50, 51, 52, 53, 54, 55, 56, 57, 58, 59, or 60 amino acids). For example, in some cases, a RuvCI polypeptide can have at least 75%, at least 80%, at least 85%, at least 90%, at least 95%, at least 98%, at least 99%, or 100%, amino acid sequence identity to amino acids 2-56 of the S. pyogenes Cas9 amino acid sequence set forth in SEQ ID NO: 1545, or a corresponding segment of a Cas9 polypeptide amino acid sequence set forth in any of SEQ ID NOs: 1-259 and 795-1346.

[0219] A RuvCII polypeptide can comprise an amino acid sequence having at least 75%, at least 80%, at least 85%, at least 90%, at least 95%, at least 98%, at least 99%, or 100%, amino acid sequence identity to a contiguous stretch of from 40 to 57 amino acids of amino acids 718-774 of the S. pyogenes Cas9 amino acid sequence set forth in SEQ ID NO: 1545, or a corresponding segment of a Cas9 polypeptide amino acid sequence set forth in any of SEQ ID NOs: 1-259 and 795-1346; and can have a length of from 40 amino acids to about 70 amino acids, e.g., from 40 amino acids to 45 amino acids, from 45 amino acids to 50 amino acids, from 50 amino acids to 55 amino acids, from 55 amino acids to 60 amino acids, from 60 amino acids to 65 amino acids, or from 65 amino acids to 70 amino acids. In some cases, a RuvCII polypeptide comprises an amino acid sequence having at least 75%, at least 80%, at least 85%, at least 90%, at least 95%, at least 98%, at least 99%, or 100%, amino acid sequence identity to amino acids 718-774 of the S. pyogenes Cas9 amino acid sequence set forth in SEQ ID NO: 1545, or a corresponding segment of a Cas9 polypeptide amino acid sequence set forth in any of SEQ ID NOs: 1-259 and 795-1346; and has a length of 55-60 (e.g., 55, 56, 57, 58, 59, or 60) amino acids.

[0220] In some cases, a short alpha-helix (S717-L727 in the S. pyogenes Cas9 set forth as SEQ ID NO: 1545) can be removed, e.g., to minimize the distance between the end of RuvCI and the beginning of RuvCII. In some cases, a short alpha-helix (S717-L727 in the S. pyogenes Cas9 t forth as SEQ ID NO: 1545) is removed and the RuvCI polypeptide is connected to the RuvCII polypeptide with a linker (e.g., a glycine-serine-serine linker, and as described elsewhere).

[0221] A RuvCII polypeptide can comprise an amino acid sequence having at least 75%, at least 80%, at least 85%, at least 90%, at least 95%, at least 98%, at least 99%, or 100%, amino acid sequence identity to a contiguous stretch of from 40 to 46 amino acids of amino acids 729-775 of the S. pyogenes Cas9 amino acid sequence set forth in SEQ ID NO: 1545, or a corresponding segment of a Cas9 polypeptide amino acid sequence set forth in any of SEQ ID NOs: 1-259 and 795-1346; and can have a length of from 40 amino acids to about 60 amino acids, e.g., from 40 amino acids to 45 amino acids, from 45 amino acids to 50 amino acids, from 50 amino acids to 55 amino acids, or from 55 amino acids to 60 amino acids. In some cases, a RuvCII polypeptide comprises an amino acid sequence having at least 75%, at least 80%, at least 85%, at least 90%, at least 95%, at least 98%, at least 99%, or 100%, amino acid sequence identity to amino acids 728-774 of the S. pyogenes Cas9 amino acid sequence set forth in SEQ ID NO: 1545, or a corresponding segment of a Cas9 polypeptide amino acid sequence set forth in any of SEQ ID NOs: 1-259 and 795-1346; and has a length of 45-50 (e.g., 45, 46, 47, 48, 49, or 50) amino acids.

[0222] An HNH polypeptide can comprise an amino acid sequence having at least 75%, at least 80%, at least 85%, at least 90%, at least 95%, at least 98%, at least 99%, or 100%, amino acid sequence identity to a contiguous stretch of from 100 to 134 amino acids of amino acids 776-909 of the S. pyogenes Cas9 amino acid sequence set forth in SEQ ID NO: 1545, or a corresponding segment of a Cas9 polypeptide amino acid sequence set forth in any of SEQ ID NOs: 1-259 and 795-1346; and can have a length of from 90 amino acids to 150 amino acids, e.g., from 90 amino acids to 95 amino acids, from 95 to amino acids to 100 amino acids, from 100 amino acids to 125 amino acids, from 125 amino acids to 130 amino acids, from 130 amino acids to 135 amino acids, from 135 amino acids to 140 amino acids, from 140 amino acids to 145 amino acids, or from 145 amino acids to 150 amino acids. In some cases, an HNH polypeptide comprises an amino acid sequence having at least 75%, at least 80%, at least 85%, at least 90%, at least 95%, at least 98%, at least 99%, or 100%, amino acid sequence identity to amino acids 776-909 of the S. pyogenes Cas9 amino acid sequence set forth in SEQ ID NO: 1545, or a corresponding segment of a Cas9 polypeptide amino acid sequence set forth in any of SEQ ID NOs: 1-259 and 795-1346; and has a length of from 130 amino acids to 140 amino acids (e.g., 130, 131, 132, 133, 134, 135, 136, 137, 138, 139, or 140 amino acids).

[0223] A RuvCIII polypeptide can comprise an amino acid sequence having at least 75%, at least 80%, at least 85%, at least 90%, at least 95%, at least 98%, at least 99%, or 100%, amino acid sequence identity to a contiguous stretch of from 150 amino acids to 190 amino acids of amino acids 910 to 1099 of the S. pyogenes Cas9 amino acid sequence set forth in SEQ ID NO: 1545, or a corresponding segment of a Cas9 polypeptide amino acid sequence set forth in any of SEQ ID NOs: 1-259 and 795-1346; and can have a length of from 150 amino acids to 160 amino acids, from 160 amino acids to 170 amino acids, from 170 amino acids to 180 amino acids, from 180 amino acids to 190 amino acids, from 190 amino acids to 200 amino acids, from 200 amino acids to 210 amino acids, or from 210 amino acids to 220 amino acids. In some cases, a RuvCIII polypeptide comprises an amino acid sequence having at least 75%, at least 80%, at least 85%, at least 90%, at least 95%, at least 98%, at least 99%, or 100%, amino acid sequence identity to amino acids 910 to 1099 of the S. pyogenes Cas9 amino acid sequence set forth in SEQ ID NO: 1545, or a corresponding segment of a Cas9 polypeptide amino acid sequence set forth in any of SEQ ID NOs: 1-259 and 795-1346; and has a length of from 180 amino acids to 190 amino acids (e.g., 180, 181, 182, 183, 184, 185, 186, 187, 188, 189, or 190 amino acids).

[0224] A PAM-interacting polypeptide can comprise an amino acid sequence having at least 75%, at least 80%, at least 85%, at least 90%, at least 95%, at least 98%, at least 99%, or 100%, amino acid sequence identity to a contiguous stretch of from 200 amino acids to 268 amino acids of amino acids 1100 to 1367 of the S. pyogenes Cas9 amino acid sequence set forth in SEQ ID NO: 1545, or a corresponding segment of a Cas9 polypeptide amino acid sequence set forth in any of SEQ ID NOs: 1-259 and 795-1346; and can have a length of from 240 amino acids to 280 amino acids, e.g., from 240 amino acids to 250 amino acids, from 250 amino acids to 260 amino acids, from 260 amino acids to 270 amino acids, or from 270 amino acids to 280 amino acids. In some cases, a PAM-interacting polypeptide comprises an amino acid sequence having at least 75%, at least 80%, at least 85%, at least 90%, at least 95%, at least 98%, at least 99%, or 100%, amino acid sequence identity to amino acids 1100 to 1367 of the S. pyogenes Cas9 amino acid sequence set forth in SEQ ID NO: 1545, or a corresponding segment of a Cas9 polypeptide amino acid sequence set forth in any of SEQ ID NOs: 1-259 and 795-1346; and has a length of from 260 amino acids to 270 amino acids (e.g., 260, 261, 262, 263, 264, 265, 266, 267, 268, 269, or 270 amino acids).

[0225] Heterologous Subcellular Localization Sequences

[0226] In some cases, the first fusion polypeptide comprises a heterologous sequence that provides for subcellular localization (e.g., an NLS for targeting to the nucleus; a mitochondrial localization signal for targeting to the mitochondria; a chloroplast localization signal for targeting to a chloroplast; an ER retention signal; and the like). In some cases, the first fusion polypeptide includes 2 or more, 3 or more, 4 or more, or 5 or more NLSs. In some cases, an NLS is located at or near (e.g., within 75 amino acids, 50 amino acids, or 30 amino acids) the N-terminus and/or at or near (e.g., within 75 amino acids, 50 amino acids, or 30 amino acids) the C-terminus.

[0227] In some cases, the first fusion polypeptide comprises an NLS. For example, in some cases, the first fusion polypeptide comprises, in order from N-terminus to C-terminus: a) an NLS; b) a first fusion partner; and c) a first polypeptide comprising: i) a RuvCI polypeptide; ii) a RuvCII polypeptide; iii) an HNH polypeptide; iv) a RuvCIII polypeptide; and v) a PAM-interacting polypeptide. In some cases, the first fusion polypeptide comprises an NLS. For example, in some cases, the first fusion polypeptide comprises, in order from N-terminus to C-terminus: a) an NLS; b) a first fusion partner; c) a first polypeptide comprising: i) a RuvCI polypeptide; ii) a RuvCII polypeptide; iii) an HNH polypeptide; iv) a RuvCIII polypeptide; and v) a PAM-interacting polypeptide; and d) an NLS. In some cases, the first fusion polypeptide comprises an NLS. For example, in some cases, the first fusion polypeptide comprises, in order from N-terminus to C-terminus: a) an NLS; b) a first fusion partner; c) a first polypeptide comprising: i) a RuvCI polypeptide; ii) a RuvCII polypeptide; iii) an HNH polypeptide; iv) a RuvCIII polypeptide; and v) a PAM-interacting polypeptide; and d) an NLS. In some cases, the first fusion polypeptide comprises an NLS. In some cases, the first fusion polypeptide comprises, in order from N-terminus to C-terminus: a) an NLS; b) a first polypeptide comprising: i) a RuvCI polypeptide; ii) a RuvCII polypeptide; iii) an HNH polypeptide; iv) a RuvCIII polypeptide; and v) a PAM-interacting polypeptide; and c) a first fusion partner. In some cases, the first fusion polypeptide comprises, in order from N-terminus to C-terminus: a) an NLS; b) a first polypeptide comprising: i) a RuvCI polypeptide; ii) a RuvCII polypeptide; iii) an HNH polypeptide; iv) a RuvCIII polypeptide; and v) a PAM-interacting polypeptide; c) a first fusion partner; and d) an NLS. In some cases, the NLS comprises the amino acid sequence MAPKKKRKVGIHGVPAA (SEQ ID NO: 1546). In some cases, the NLS comprises the amino acid sequence KRPAATKKAGQAKKKK (SEQ ID NO: 1547). Other suitable NLS are described elsewhere herein.

[0228] An NLS can be at or near the N-terminus and/or the C-terminus. In some cases, the first fusion polypeptide comprises two or more NLSs (e.g., 3 or more, 4 or more, or 5 or more NLSs). In some cases, the first fusion polypeptide comprises one or more NLSs (e.g., 2 or more, 3 or more, or 4 or more NLSs) at or near the N-terminus and/or one or more NLSs (e.g., 2 or more, 3 or more, or 4 or more NLSs) at or near the C-terminus. The term “at or near” is used here because, as is known in the art, the NLS need not be at the actual terminus of a protein, but can be positioned near (e.g., within 100 amino acids of) an N- and/or C-terminus (e.g., within 80, within 75, within 60, within 55, within 50, within 45, within 40, within 35, or within 30 amino acids of the an N- and/or C-terminus).

[0229] Fusion Partner at or Near N-Terminus of First Fusion Polypeptide

[0230] In some cases, the first fusion polypeptide comprises, in order from N-terminus to C-terminus: a) a first fusion partner; and b) a first polypeptide comprising: i) a RuvCI polypeptide; ii) a RuvCII polypeptide; iii) an HNH polypeptide; iv) a RuvCIII polypeptide; and v) a PAM-interacting polypeptide.

[0231] In some cases, a first fusion polypeptide comprises one or more linker polypeptides. For example, a linker polypeptide can be interposed between any of: a) an NLS and a fusion partner; b) a fusion partner and a RuvCI polypeptide; c) a RuvCI polypeptide and a RuvCII polypeptide; and d) a PAM-interacting polypeptide and an NLS.

[0232] The linker polypeptide may have any of a variety of amino acid sequences. Proteins can be joined by a spacer peptide, generally of a flexible nature, although other chemical linkages are not excluded. Suitable linkers include polypeptides of between about 6 amino acids and about 40 amino acids in length, or between about 6 amino acids and about 25 amino acids in length. These linkers are generally produced by using synthetic, linker-encoding oligonucleotides to couple the proteins. Peptide linkers with a degree of flexibility will generally be preferred. The linking peptides may have virtually any amino acid sequence, bearing in mind that the preferred linkers will have a sequence that results in a generally flexible peptide. The use of small amino acids, such as glycine and alanine, are of use in creating a flexible peptide. The creation of such sequences is routine to those of skill in the art. A variety of different linkers are commercially available and are considered suitable for use.

[0233] Exemplary polypeptide linkers include glycine polymers (G)ₙ, glycine-serine polymers (including, for example, (GS)ₙ, GSGGSₙ (SEQ ID NO: 1548) and GGGSₙ (SEQ ID NO: 1549), where n is an integer of at least one), glycine-alanine polymers, alanine-serine polymers. Exemplary linkers can comprise amino acid sequences including, but not limited to, GGSG (SEQ ID NO: 1550), GGSGG (SEQ ID NO: 1551), GSGSG (SEQ ID NO: 1552), GSGGG (SEQ ID NO: 1553), GGGSG (SEQ ID NO: 1554), GSSSG (SEQ ID NO: 1555), and the like. The ordinarily skilled artisan will recognize that design of a peptide conjugated to any elements described above can include linkers that are all or partially flexible, such that the linker can include a flexible linker as well as one or more portions that confer less flexible structure.

[0234] Fusion Partner at or Near C-Terminus of First Fusion Polypeptide

[0235] In some cases, the first fusion polypeptide comprises, in order from N-terminus to C-terminus: a) a first polypeptide comprising: i) a RuvCI polypeptide; ii) a RuvCII polypeptide; iii) an HNH polypeptide; iv) a RuvCIII polypeptide; and v) a PAM-interacting polypeptide; and b) a first fusion partner.

[0236] In some cases, a first fusion polypeptide comprises one or more linker polypeptides. For example, a linker polypeptide can be interposed between any of: a) an NLS and a RuvCI polypeptide; b) a RuvCI polypeptide and a RuvCII polypeptide; c) a PAM-interacting polypeptide and an NLS; d) a PAM-interacting polypeptide and a second fusion partner; and e) a fusion partner and an NLS. Suitable linker polypeptides are as described above.

[0237] Fusion Partner Located Internally within First Fusion Polypeptide

[0238] In some cases, the fusion partner is located internally with the first polypeptide. In some cases, the first fusion partner is inserted within the HNH polypeptide. In some cases, the first fusion partner is inserted within the RuvCIII polypeptide.

[0239] Fusion Partner Inserted into HNH Polypeptide

[0240] In some cases, the first fusion partner is inserted within the HNH polypeptide. The HNH polypeptide of S. pyogenes Cas9 is amino acids 776-909 of the amino acid sequence set forth in SEQ ID NO: 1545. For example, in some cases, the first fusion partner is inserted in a site within amino acids 800 to 900 of amino acids 776-909 of the amino acid sequence of the S. pyogenes Cas9 amino acid sequence set forth in SEQ ID NO: 1545, or a corresponding segment of a Cas9 polypeptide amino acid sequence set forth in any of SEQ ID NOs: 1-259 and 795-1346. For example, in some cases, the first fusion partner is inserted at or near amino acid 868 of amino acids 776-909 of the amino acid sequence of the S. pyogenes Cas9 amino acid sequence set forth in SEQ ID NO: 1545, or a corresponding segment of a Cas9 polypeptide amino acid sequence set forth in any of SEQ ID NOs: 1-259 and 795-1346. In some cases, the first fusion partner is inserted at amino acid 868 of amino acids 776-909 of the amino acid sequence of the S. pyogenes Cas9 amino acid sequence set forth in SEQ ID NO: 1545, or a corresponding segment of a Cas9 polypeptide amino acid sequence set forth in any of SEQ ID NOs: 1-259 and 795-1346. In some cases, the first fusion partner is inserted at amino acid 860 of amino acids 776-909 of the amino acid sequence of the S. pyogenes Cas9 amino acid sequence set forth in SEQ ID NO: 1545, or a corresponding segment of a Cas9 polypeptide amino acid sequence set forth in any of SEQ ID NOs: 1-259 and 795-1346. In some cases, the first fusion partner is inserted at amino acid 861 of amino acids 776-909 of the amino acid sequence of the S. pyogenes Cas9 amino acid sequence set forth in SEQ ID NO: 1545, or a corresponding segment of a Cas9 polypeptide amino acid sequence set forth in any of SEQ ID NOs: 1-259 and 795-1346. In some cases, the first fusion partner is inserted at amino acid 862 of amino acids 776-909 of the amino acid sequence of the S. pyogenes Cas9 amino acid sequence set forth in SEQ ID NO: 1545, or a corresponding segment of a Cas9 polypeptide amino acid sequence set forth in any of SEQ ID NOs: 1-259 and 795-1346. In some cases, the first fusion partner is inserted at amino acid 863 of amino acids 776-909 of the amino acid sequence of the S. pyogenes Cas9 amino acid sequence set forth in SEQ ID NO: 1545, or a corresponding segment of a Cas9 polypeptide amino acid sequence set forth in any of SEQ ID NOs: 1-259 and 795-1346. In some cases, the first fusion partner is inserted at amino acid 864 of amino acids 776-909 of the amino acid sequence of the S. pyogenes Cas9 amino acid sequence set forth in SEQ ID NO: 1545, or a corresponding segment of a Cas9 polypeptide amino acid sequence set forth in any of SEQ ID NOs: 1-259 and 795-1346. In some cases, the first fusion partner is inserted at amino acid 865 of amino acids 776-909 of the amino acid sequence of the S. pyogenes Cas9 amino acid sequence set forth in SEQ ID NO: 1545, or a corresponding segment of a Cas9 polypeptide amino acid sequence set forth in any of SEQ ID NOs: 1-259 and 795-1346. In some cases, the first fusion partner is inserted at amino acid 866 of amino acids 776-909 of the amino acid sequence of the S. pyogenes Cas9 amino acid sequence set forth in SEQ ID NO: 1545, or a corresponding segment of a Cas9 polypeptide amino acid sequence set forth in any of SEQ ID NOs: 1-259 and 795-1346. In some cases, the first fusion partner is inserted at amino acid 867 of amino acids 776-909 of the amino acid sequence of the S. pyogenes Cas9 amino acid sequence set forth in SEQ ID NO: 1545, or a corresponding segment of a Cas9 polypeptide amino acid sequence set forth in any of SEQ ID NOs: 1-259 and 795-1346. In some cases, the first fusion partner is inserted at amino acid 869 of amino acids 776-909 of the amino acid sequence of the S. pyogenes Cas9 amino acid sequence set forth in SEQ ID NO: 1545, or a corresponding segment of a Cas9 polypeptide amino acid sequence set forth in any of SEQ ID NOs: 1-259 and 795-1346. In some cases, the first fusion partner is inserted at amino acid 870 of amino acids 776-909 of the amino acid sequence of the S. pyogenes Cas9 amino acid sequence set forth in SEQ ID NO: 1545, or a corresponding segment of a Cas9 polypeptide amino acid sequence set forth in any of SEQ ID NOs: 1-259 and 795-1346. In some cases, the first fusion partner is inserted at amino acid 871 of amino acids 776-909 of the amino acid sequence of the S. pyogenes Cas9 amino acid sequence set forth in SEQ ID NO: 1545, or a corresponding segment of a Cas9 polypeptide amino acid sequence set forth in any of SEQ ID NOs: 1-259 and 795-1346. In some cases, the first fusion partner is inserted at amino acid 872 of amino acids 776-909 of the amino acid sequence of the S. pyogenes Cas9 amino acid sequence set forth in SEQ ID NO: 1545, or a corresponding segment of a Cas9 polypeptide amino acid sequence set forth in any of SEQ ID NOs: 1-259 and 795-1346. In some cases, the first fusion partner is inserted at amino acid 873 of amino acids 776-909 of the amino acid sequence of the S. pyogenes Cas9 amino acid sequence set forth in SEQ ID NO: 1545, or a corresponding segment of a Cas9 polypeptide amino acid sequence set forth in any of SEQ ID NOs: 1-259 and 795-1346. In some cases, the first fusion partner is inserted at amino acid 874 of amino acids 776-909 of the amino acid sequence of the S. pyogenes Cas9 amino acid sequence set forth in SEQ ID NO: 1545, or a corresponding segment of a Cas9 polypeptide amino acid sequence set forth in any of SEQ ID NOs: 1-259 and 795-1346. In some cases, the first fusion partner is inserted at amino acid 875 of amino acids 776-909 of the amino acid sequence of the S. pyogenes Cas9 amino acid sequence set forth in SEQ ID NO: 1545, or a corresponding segment of a Cas9 polypeptide amino acid sequence set forth in any of SEQ ID NOs: 1-259 and 795-1346.

[0241] As one non-limiting example, the first fusion polypeptide can comprise, in order from N-terminus to C-terminus: i) a RuvCI polypeptide; ii) a RuvCII polypeptide; iii) an N-terminal portion of an HNH polypeptide; iv) a first fusion partner; v) a C-terminal portion of an HNH polypeptide; vi) a RuvCIII polypeptide; and v) a PAM-interacting polypeptide.

[0242] An N-terminal portion of an HNH polypeptide can comprise an amino acid sequence having at least 75%, at least 80%, at least 85%, at least 90%, at least 95%, at least 98%, at least 99%, or 100%, amino acid sequence identity to a contiguous stretch of from 80 amino acids to 92 amino acids of amino acids 776 to 867 of the S. pyogenes Cas9 amino acid sequence set forth in SEQ ID NO: 1545, or a corresponding segment of a Cas9 polypeptide amino acid sequence set forth in any of SEQ ID NOs: 1-259 and 795-1346; and can have a length of from 80 amino acids to 110 amino acids, e.g., from 80 amino acids to 90 amino acids, from 90 amino acids to 100 amino acids, or from 100 amino acids to 110 amino acids. In some cases, an N-terminal portion of an HNH polypeptide comprises an amino acid sequence having at least 75%, at least 80%, at least 85%, at least 90%, at least 95%, at least 98%, at least 99%, or 100%, amino acid sequence identity to amino acids 776 to 867 of the S. pyogenes Cas9 amino acid sequence set forth in SEQ ID NO: 1545, or a corresponding segment of a Cas9 polypeptide amino acid sequence set forth in any of SEQ ID NOs: 1-259 and 795-1346; and has a length of 85 amino acids to 95 amino acids (85, 86, 87, 88, 89, 90, 91, 92, 93, 94, or 95 amino acids). An N-terminal portion of an HNH polypeptide can comprise an amino acid sequence having at least 75%, at least 80%, at least 85%, at least 90%, at least 95%, at least 98%, at least 99%, or 100%, amino acid sequence identity to a contiguous stretch of from 50 amino acids to 66 amino acids of amino acids 776-841 of the S. pyogenes Cas9 amino acid sequence set forth in SEQ ID NO: 1545, or a corresponding segment of a Cas9 polypeptide amino acid sequence set forth in any of SEQ ID NOs: 1-259 and 795-1346; and can have a length of from 50 amino acids to 80 amino acids, e.g., from 50 amino acids to 60 amino acids, from 60 amino acids to 70 amino acids, or from 70 amino acids to 80 amino acids.

[0243] A C-terminal portion of an HNH polypeptide can comprise an amino acid sequence having at least 75%, at least 80%, at least 85%, at least 90%, at least 95%, at least 98%, at least 99%, or 100%, amino acid sequence identity to a contiguous stretch of from 35 to 42 amino acids of amino acids 868-909 of the S. pyogenes Cas9 amino acid sequence set forth in SEQ ID NO: 1545, or a corresponding segment of a Cas9 polypeptide amino acid sequence set forth in any of SEQ ID NOs: 1-259 and 795-1346; and can have a length of from 35 to 42 amino acids (e.g., 35, 36, 37, 38, 39, 40, 41, or 42 amino acids). A C-terminal portion of an HNH polypeptide can comprise an amino acid sequence having at least 75%, at least 80%, at least 85%, at least 90%, at least 95%, at least 98%, at least 99%, or 100%, amino acid sequence identity to a contiguous stretch of from 50 amino acids to 67 amino acids of amino acids 842-909 of the S. pyogenes Cas9 amino acid sequence set forth in SEQ ID NO: 1545, or a corresponding segment of a Cas9 polypeptide amino acid sequence set forth in any of SEQ ID NOs: 1-259 and 795-1346; and can have a length of from 50 amino acids to 80 amino acids, e.g., from 50 amino acids to 60 amino acids, from 60 amino acids to 70 amino acids, or from 70 amino acids to 80 amino acids.

[0244] For example, in some cases, the first fusion polypeptide comprises, in order from N-terminus to C-terminus: i) a RuvCI polypeptide; ii) a RuvCII polypeptide; iii) an N-terminal portion of an HNH polypeptide comprising an amino acid sequence having at least 75%, at least 80%, at least 85%, at least 90%, at least 95%, at least 98%, at least 99%, or 100%, amino acid sequence identity to amino acids 719 to 860 of the S. pyogenes Cas9 amino acid sequence set forth in SEQ ID NO: 1545, or a corresponding segment of a Cas9 polypeptide amino acid sequence set forth in any of SEQ ID NOs: 1-259 and 795-1346; iv) a first fusion partner; v) a C-terminal portion of an HNH polypeptide comprising an amino acid sequence having at least 75%, at least 80%, at least 85%, at least 90%, at least 95%, at least 98%, at least 99%, or 100%, amino acid sequence identity to amino acids 861 to 909 of the S. pyogenes Cas9 amino acid sequence set forth in SEQ ID NO: 1545, or a corresponding segment of a Cas9 polypeptide amino acid sequence set forth in any of SEQ ID NOs: 1-259 and 795-1346; vi) a RuvCIII polypeptide; and vii) a PAM-interacting polypeptide.

[0245] As another example, in some cases, the first fusion polypeptide comprises, in order from N-terminus to C-terminus: i) a RuvCI polypeptide; ii) a RuvCII polypeptide; iii) an N-terminal portion of an HNH polypeptide comprising an amino acid sequence having at least 75%, at least 80%, at least 85%, at least 90%, at least 95%, at least 98%, at least 99%, or 100%, amino acid sequence identity to amino acids 719 to 861 of the S. pyogenes Cas9 amino acid sequence set forth in SEQ ID NO: 1545, or a corresponding segment of a Cas9 polypeptide amino acid sequence set forth in any of SEQ ID NOs: 1-259 and 795-1346; iv) a first fusion partner; v) a C-terminal portion of an HNH polypeptide comprising an amino acid sequence having at least 75%, at least 80%, at least 85%, at least 90%, at least 95%, at least 98%, at least 99%, or 100%, amino acid sequence identity to amino acids 862 to 909 of the S. pyogenes Cas9 amino acid sequence set forth in SEQ ID NO: 1545, or a corresponding segment of a Cas9 polypeptide amino acid sequence set forth in any of SEQ ID NOs: 1-259 and 795-1346; vi) a RuvCIII polypeptide; and vii) a PAM-interacting polypeptide.

[0246] As another example, in some cases, the first fusion polypeptide comprises, in order from N-terminus to C-terminus: i) a RuvCI polypeptide; ii) a RuvCII polypeptide; iii) an N-terminal portion of an HNH polypeptide comprising an amino acid sequence having at least 75%, at least 80%, at least 85%, at least 90%, at least 95%, at least 98%, at least 99%, or 100%, amino acid sequence identity to amino acids 719 to 862 of the S. pyogenes Cas9 amino acid sequence set forth in SEQ ID NO: 1545, or a corresponding segment of a Cas9 polypeptide amino acid sequence set forth in any of SEQ ID NOs: 1-259 and 795-1346; iv) a first fusion partner; v) a C-terminal portion of an HNH polypeptide comprising an amino acid sequence having at least 75%, at least 80%, at least 85%, at least 90%, at least 95%, at least 98%, at least 99%, or 100%, amino acid sequence identity to amino acids 863 to 909 of the S. pyogenes Cas9 amino acid sequence set forth in SEQ ID NO: 1545, or a corresponding segment of a Cas9 polypeptide amino acid sequence set forth in any of SEQ ID NOs: 1-259 and 795-1346; vi) a RuvCIII polypeptide; and vii) a PAM-interacting polypeptide.

[0247] As another example, in some cases, the first fusion polypeptide comprises, in order from N-terminus to C-terminus: i) a RuvCI polypeptide; ii) a RuvCII polypeptide; iii) an N-terminal portion of an HNH polypeptide comprising an amino acid sequence having at least 75%, at least 80%, at least 85%, at least 90%, at least 95%, at least 98%, at least 99%, or 100%, amino acid sequence identity to amino acids 719 to 863 of the S. pyogenes Cas9 amino acid sequence set forth in SEQ ID NO: 1545, or a corresponding segment of a Cas9 polypeptide amino acid sequence set forth in any of SEQ ID NOs: 1-259 and 795-1346; iv) a first fusion partner; v) a C-terminal portion of an HNH polypeptide comprising an amino acid sequence having at least 75%, at least 80%, at least 85%, at least 90%, at least 95%, at least 98%, at least 99%, or 100%, amino acid sequence identity to amino acids 864 to 909 of the S. pyogenes Cas9 amino acid sequence set forth in SEQ ID NO: 1545, or a corresponding segment of a Cas9 polypeptide amino acid sequence set forth in any of SEQ ID NOs: 1-259 and 795-1346; vi) a RuvCIII polypeptide; and vii) a PAM-interacting polypeptide.

[0248] As another example, in some cases, the first fusion polypeptide comprises, in order from N-terminus to C-terminus: i) a RuvCI polypeptide; ii) a RuvCII polypeptide; iii) an N-terminal portion of an HNH polypeptide comprising an amino acid sequence having at least 75%, at least 80%, at least 85%, at least 90%, at least 95%, at least 98%, at least 99%, or 100%, amino acid sequence identity to amino acids 719 to 864 of the S. pyogenes Cas9 amino acid sequence set forth in SEQ ID NO: 1545, or a corresponding segment of a Cas9 polypeptide amino acid sequence set forth in any of SEQ ID NOs: 1-259 and 795-1346; iv) a first fusion partner; v) a C-terminal portion of an HNH polypeptide comprising an amino acid sequence having at least 75%, at least 80%, at least 85%, at least 90%, at least 95%, at least 98%, at least 99%, or 100%, amino acid sequence identity to amino acids 865 to 909 of the S. pyogenes Cas9 amino acid sequence set forth in SEQ ID NO: 1545, or a corresponding segment of a Cas9 polypeptide amino acid sequence set forth in any of SEQ ID NOs: 1-259 and 795-1346; vi) a RuvCIII polypeptide; and vii) a PAM-interacting polypeptide.

[0249] As another example, in some cases, the first fusion polypeptide comprises, in order from N-terminus to C-terminus: i) a RuvCI polypeptide; ii) a RuvCII polypeptide; iii) an N-terminal portion of an HNH polypeptide comprising an amino acid sequence having at least 75%, at least 80%, at least 85%, at least 90%, at least 95%, at least 98%, at least 99%, or 100%, amino acid sequence identity to amino acids 719 to 865 of the S. pyogenes Cas9 amino acid sequence set forth in SEQ ID NO: 1545, or a corresponding segment of a Cas9 polypeptide amino acid sequence set forth in any of SEQ ID NOs: 1-259 and 795-1346; iv) a first fusion partner; v) a C-terminal portion of an HNH polypeptide comprising an amino acid sequence having at least 75%, at least 80%, at least 85%, at least 90%, at least 95%, at least 98%, at least 99%, or 100%, amino acid sequence identity to amino acids 866 to 909 of the S. pyogenes Cas9 amino acid sequence set forth in SEQ ID NO: 1545, or a corresponding segment of a Cas9 polypeptide amino acid sequence set forth in any of SEQ ID NOs: 1-259 and 795-1346; vi) a RuvCIII polypeptide; and vii) a PAM-interacting polypeptide.

[0250] As another example, in some cases, the first fusion polypeptide comprises, in order from N-terminus to C-terminus: i) a RuvCI polypeptide; ii) a RuvCII polypeptide; iii) an N-terminal portion of an HNH polypeptide comprising an amino acid sequence having at least 75%, at least 80%, at least 85%, at least 90%, at least 95%, at least 98%, at least 99%, or 100%, amino acid sequence identity to amino acids 719 to 866 of the S. pyogenes Cas9 amino acid sequence set forth in SEQ ID NO: 1545, or a corresponding segment of a Cas9 polypeptide amino acid sequence set forth in any of SEQ ID NOs: 1-259 and 795-1346; iv) a first fusion partner; v) a C-terminal portion of an HNH polypeptide comprising an amino acid sequence having at least 75%, at least 80%, at least 85%, at least 90%, at least 95%, at least 98%, at least 99%, or 100%, amino acid sequence identity to amino acids 867 to 909 of the S. pyogenes Cas9 amino acid sequence set forth in SEQ ID NO: 1545, or a corresponding segment of a Cas9 polypeptide amino acid sequence set forth in any of SEQ ID NOs: 1-259 and 795-1346; vi) a RuvCIII polypeptide; and vii) a PAM-interacting polypeptide.

[0251] As another example, in some cases, the first fusion polypeptide comprises, in order from N-terminus to C-terminus: i) a RuvCI polypeptide; ii) a RuvCII polypeptide; iii) an N-terminal portion of an HNH polypeptide comprising an amino acid sequence having at least 75%, at least 80%, at least 85%, at least 90%, at least 95%, at least 98%, at least 99%, or 100%, amino acid sequence identity to amino acids 719 to 867 of the S. pyogenes Cas9 amino acid sequence set forth in SEQ ID NO: 1545, or a corresponding segment of a Cas9 polypeptide amino acid sequence set forth in any of SEQ ID NOs: 1-259 and 795-1346; iv) a first fusion partner; v) a C-terminal portion of an HNH polypeptide comprising an amino acid sequence having at least 75%, at least 80%, at least 85%, at least 90%, at least 95%, at least 98%, at least 99%, or 100%, amino acid sequence identity to amino acids 868 to 909 of the S. pyogenes Cas9 amino acid sequence set forth in SEQ ID NO: 1545, or a corresponding segment of a Cas9 polypeptide amino acid sequence set forth in any of SEQ ID NOs: 1-259 and 795-1346; vi) a RuvCIII polypeptide; and v) a PAM-interacting polypeptide.

[0252] As another example, in some cases, the first fusion polypeptide comprises, in order from N-terminus to C-terminus: i) a RuvCI polypeptide; ii) a RuvCII polypeptide; iii) an N-terminal portion of an HNH polypeptide comprising an amino acid sequence having at least 75%, at least 80%, at least 85%, at least 90%, at least 95%, at least 98%, at least 99%, or 100%, amino acid sequence identity to amino acids 719 to 868 of the S. pyogenes Cas9 amino acid sequence set forth in SEQ ID NO: 1545, or a corresponding segment of a Cas9 polypeptide amino acid sequence set forth in any of SEQ ID NOs: 1-259 and 795-1346; iv) a first fusion partner; v) a C-terminal portion of an HNH polypeptide comprising an amino acid sequence having at least 75%, at least 80%, at least 85%, at least 90%, at least 95%, at least 98%, at least 99%, or 100%, amino acid sequence identity to amino acids 869 to 909 of the S. pyogenes Cas9 amino acid sequence set forth in SEQ ID NO: 1545, or a corresponding segment of a Cas9 polypeptide amino acid sequence set forth in any of SEQ ID NOs: 1-259 and 795-1346; vi) a RuvCIII polypeptide; and vii) a PAM-interacting polypeptide.

[0253] As another example, in some cases, the first fusion polypeptide comprises, in order from N-terminus to C-terminus: i) a RuvCI polypeptide; ii) a RuvCII polypeptide; iii) an N-terminal portion of an HNH polypeptide comprising an amino acid sequence having at least 75%, at least 80%, at least 85%, at least 90%, at least 95%, at least 98%, at least 99%, or 100%, amino acid sequence identity to amino acids 719 to 869 of the S. pyogenes Cas9 amino acid sequence set forth in SEQ ID NO: 1545, or a corresponding segment of a Cas9 polypeptide amino acid sequence set forth in any of SEQ ID NOs: 1-259 and 795-1346; iv) a first fusion partner; v) a C-terminal portion of an HNH polypeptide comprising an amino acid sequence having at least 75%, at least 80%, at least 85%, at least 90%, at least 95%, at least 98%, at least 99%, or 100%, amino acid sequence identity to amino acids 870 to 909 of the S. pyogenes Cas9 amino acid sequence set forth in SEQ ID NO: 1545, or a corresponding segment of a Cas9 polypeptide amino acid sequence set forth in any of SEQ ID NOs: 1-259 and 795-1346; vi) a RuvCIII polypeptide; and vii) a PAM-interacting polypeptide.

[0254] As another example, in some cases, the first fusion polypeptide comprises, in order from N-terminus to C-terminus: i) a RuvCI polypeptide; ii) a RuvCII polypeptide; iii) an N-terminal portion of an HNH polypeptide comprising an amino acid sequence having at least 75%, at least 80%, at least 85%, at least 90%, at least 95%, at least 98%, at least 99%, or 100%, amino acid sequence identity to amino acids 719 to 870 of the S. pyogenes Cas9 amino acid sequence set forth in SEQ ID NO: 1545, or a corresponding segment of a Cas9 polypeptide amino acid sequence set forth in any of SEQ ID NOs: 1-259 and 795-1346; iv) a first fusion partner; v) a C-terminal portion of an HNH polypeptide comprising an amino acid sequence having at least 75%, at least 80%, at least 85%, at least 90%, at least 95%, at least 98%, at least 99%, or 100%, amino acid sequence identity to amino acids 871 to 909 of the S. pyogenes Cas9 amino acid sequence set forth in SEQ ID NO: 1545, or a corresponding segment of a Cas9 polypeptide amino acid sequence set forth in any of SEQ ID NOs: 1-259 and 795-1346; vi) a RuvCIII polypeptide; and vii) a PAM-interacting polypeptide.

[0255] As another example, in some cases, the first fusion polypeptide comprises, in order from N-terminus to C-terminus: i) a RuvCI polypeptide; ii) a RuvCII polypeptide; iii) an N-terminal portion of an HNH polypeptide comprising an amino acid sequence having at least 75%, at least 80%, at least 85%, at least 90%, at least 95%, at least 98%, at least 99%, or 100%, amino acid sequence identity to amino acids 719 to 871 of the S. pyogenes Cas9 amino acid sequence set forth in SEQ ID NO: 1545, or a corresponding segment of a Cas9 polypeptide amino acid sequence set forth in any of SEQ ID NOs: 1-259 and 795-1346; iv) a first fusion partner; v) a C-terminal portion of an HNH polypeptide comprising an amino acid sequence having at least 75%, at least 80%, at least 85%, at least 90%, at least 95%, at least 98%, at least 99%, or 100%, amino acid sequence identity to amino acids 872 to 909 of the S. pyogenes Cas9 amino acid sequence set forth in SEQ ID NO: 1545, or a corresponding segment of a Cas9 polypeptide amino acid sequence set forth in any of SEQ ID NOs: 1-259 and 795-1346; vi) a RuvCIII polypeptide; and vii) a PAM-interacting polypeptide.

[0256] As another example, in some cases, the first fusion polypeptide comprises, in order from N-terminus to C-terminus: i) a RuvCI polypeptide; ii) a RuvCII polypeptide; iii) an N-terminal portion of an HNH polypeptide comprising an amino acid sequence having at least 75%, at least 80%, at least 85%, at least 90%, at least 95%, at least 98%, at least 99%, or 100%, amino acid sequence identity to amino acids 719 to 872 of the S. pyogenes Cas9 amino acid sequence set forth in SEQ ID NO: 1545, or a corresponding segment of a Cas9 polypeptide amino acid sequence set forth in any of SEQ ID NOs: 1-259 and 795-1346; iv) a first fusion partner; v) a C-terminal portion of an HNH polypeptide comprising an amino acid sequence having at least 75%, at least 80%, at least 85%, at least 90%, at least 95%, at least 98%, at least 99%, or 100%, amino acid sequence identity to amino acids 873 to 909 of the S. pyogenes Cas9 amino acid sequence set forth in SEQ ID NO: 1545, or a corresponding segment of a Cas9 polypeptide amino acid sequence set forth in any of SEQ ID NOs: 1-259 and 795-1346; vi) a RuvCIII polypeptide; and vii) a PAM-interacting polypeptide.

[0257] As another example, in some cases, the first fusion polypeptide comprises, in order from N-terminus to C-terminus: i) a RuvCI polypeptide; ii) a RuvCII polypeptide; iii) an N-terminal portion of an HNH polypeptide comprising an amino acid sequence having at least 75%, at least 80%, at least 85%, at least 90%, at least 95%, at least 98%, at least 99%, or 100%, amino acid sequence identity to amino acids 719 to 873 of the S. pyogenes Cas9 amino acid sequence set forth in SEQ ID NO: 1545, or a corresponding segment of a Cas9 polypeptide amino acid sequence set forth in any of SEQ ID NOs: 1-259 and 795-1346; iv) a first fusion partner; v) a C-terminal portion of an HNH polypeptide comprising an amino acid sequence having at least 75%, at least 80%, at least 85%, at least 90%, at least 95%, at least 98%, at least 99%, or 100%, amino acid sequence identity to amino acids 874 to 909 of the S. pyogenes Cas9 amino acid sequence set forth in SEQ ID NO: 1545, or a corresponding segment of a Cas9 polypeptide amino acid sequence set forth in any of SEQ ID NOs: 1-259 and 795-1346; vi) a RuvCIII polypeptide; and vii) a PAM-interacting polypeptide.

[0258] As another example, in some cases, the first fusion polypeptide comprises, in order from N-terminus to C-terminus: i) a RuvCI polypeptide; ii) a RuvCII polypeptide; iii) an N-terminal portion of an HNH polypeptide comprising an amino acid sequence having at least 75%, at least 80%, at least 85%, at least 90%, at least 95%, at least 98%, at least 99%, or 100%, amino acid sequence identity to amino acids 719 to 874 of the S. pyogenes Cas9 amino acid sequence set forth in SEQ ID NO: 1545, or a corresponding segment of a Cas9 polypeptide amino acid sequence set forth in any of SEQ ID NOs: 1-259 and 795-1346; iv) a first fusion partner; v) a C-terminal portion of an HNH polypeptide comprising an amino acid sequence having at least 75%, at least 80%, at least 85%, at least 90%, at least 95%, at least 98%, at least 99%, or 100%, amino acid sequence identity to amino acids 875 to 909 of the S. pyogenes Cas9 amino acid sequence set forth in SEQ ID NO: 1545, or a corresponding segment of a Cas9 polypeptide amino acid sequence set forth in any of SEQ ID NOs: 1-259 and 795-1346; vi) a RuvCIII polypeptide; and vii) a PAM-interacting polypeptide.

Fusion Partner Inserted within RuvCIII Polypeptide

[0259] In some cases, the first fusion partner is inserted within the RuvCIII polypeptide. The RuvCIII polypeptide of S. pyogenes Cas9 is amino acids 910-1099 of the amino acid sequence set forth in SEQ ID NO: 1545. For example, in some cases, the first fusion partner is inserted in a site within amino acids 950 to 1060 of amino acids 910-1099 of the amino acid sequence of the S. pyogenes Cas9 amino acid sequence set forth in SEQ ID NO: 1545, or a corresponding segment of a Cas9 polypeptide amino acid sequence set forth in any of SEQ ID NOs: 1-259 and 795-1346. For example, in some cases, the first fusion partner is inserted at or near amino acid 1016 of amino acids 910-1099 of the amino acid sequence of the S. pyogenes Cas9 amino acid sequence set forth in SEQ ID NO: 1545, or a corresponding segment of a Cas9 polypeptide amino acid sequence set forth in any of SEQ ID NOs: 1-259 and 795-1346. In some cases, the first fusion partner is inserted at amino acid 1016 of amino acids 910-1099 of the amino acid sequence of the S. pyogenes Cas9 amino acid sequence set forth in SEQ ID NO: 1545, or a corresponding segment of a Cas9 polypeptide amino acid sequence set forth in any of SEQ ID NOs: 1-259 and 795-1346. In some cases, the first fusion partner is inserted at amino acid 1010 of amino acids 910-1099 of the amino acid sequence of the S. pyogenes Cas9 amino acid sequence set forth in SEQ ID NO: 1545, or a corresponding segment of a Cas9 polypeptide amino acid sequence set forth in any of SEQ ID NOs: 1-259 and 795-1346. In some cases, the first fusion partner is inserted at amino acid 1011 of amino acids 910-1099 of the amino acid sequence of the S. pyogenes Cas9 amino acid sequence set forth in SEQ ID NO: 1545, or a corresponding segment of a Cas9 polypeptide amino acid sequence set forth in any of SEQ ID NOs: 1-259 and 795-1346. In some cases, the first fusion partner is inserted at amino acid 1012 of amino acids 910-1099 of the amino acid sequence of the S. pyogenes Cas9 amino acid sequence set forth in SEQ ID NO: 1545, or a corresponding segment of a Cas9 polypeptide amino acid sequence set forth in any of SEQ ID NOs: 1-259 and 795-1346. In some cases, the first fusion partner is inserted at amino acid 1013 of amino acids 910-1099 of the amino acid sequence of the S. pyogenes Cas9 amino acid sequence set forth in SEQ ID NO: 1545, or a corresponding segment of a Cas9 polypeptide amino acid sequence set forth in any of SEQ ID NOs: 1-259 and 795-1346. In some cases, the first fusion partner is inserted at amino acid 1014 of amino acids 910-1099 of the amino acid sequence of the S. pyogenes Cas9 amino acid sequence set forth in SEQ ID NO: 1545, or a corresponding segment of a Cas9 polypeptide amino acid sequence set forth in any of SEQ ID NOs: 1-259 and 795-1346. In some cases, the first fusion partner is inserted at amino acid 1015 of amino acids 910-1099 of the amino acid sequence of the S. pyogenes Cas9 amino acid sequence set forth in SEQ ID NO: 1545, or a corresponding segment of a Cas9 polypeptide amino acid sequence set forth in any of SEQ ID NOs: 1-259 and 795-1346. In some cases, the first fusion partner is inserted at amino acid 1017 of amino acids 910-1099 of the amino acid sequence of the S. pyogenes Cas9 amino acid sequence set forth in SEQ ID NO: 1545, or a corresponding segment of a Cas9 polypeptide amino acid sequence set forth in any of SEQ ID NOs: 1-259 and 795-1346. In some cases, the first fusion partner is inserted at amino acid 1018 of amino acids 910-1099 of the amino acid sequence of the S. pyogenes Cas9 amino acid sequence set forth in SEQ ID NO: 1545, or a corresponding segment of a Cas9 polypeptide amino acid sequence set forth in any of SEQ ID NOs: 1-259 and 795-1346. In some cases, the first fusion partner is inserted at amino acid 1019 of amino acids 910-1099 of the amino acid sequence of the S. pyogenes Cas9 amino acid sequence set forth in SEQ ID NO: 1545, or a corresponding segment of a Cas9 polypeptide amino acid sequence set forth in any of SEQ ID NOs: 1-259 and 795-1346. In some cases, the first fusion partner is inserted at amino acid 1020 of amino acids 910-1099 of the amino acid sequence of the S. pyogenes Cas9 amino acid sequence set forth in SEQ ID NO: 1545, or a corresponding segment of a Cas9 polypeptide amino acid sequence set forth in any of SEQ ID NOs: 1-259 and 795-1346. In some cases, the first fusion partner is inserted at amino acid 1021 of amino acids 910-1099 of the amino acid sequence of the S. pyogenes Cas9 amino acid sequence set forth in SEQ ID NO: 1545, or a corresponding segment of a Cas9 polypeptide amino acid sequence set forth in any of SEQ ID NOs: 1-259 and 795-1346. In some cases, the first fusion partner is inserted at amino acid 1022 of amino acids 910-1099 of the amino acid sequence of the S. pyogenes Cas9 amino acid sequence set forth in SEQ ID NO: 1545, or a corresponding segment of a Cas9 polypeptide amino acid sequence set forth in any of SEQ ID NOs: 1-259 and 795-1346. In some cases, the first fusion partner is inserted at amino acid 1023 of amino acids 910-1099 of the amino acid sequence of the S. pyogenes Cas9 amino acid sequence set forth in SEQ ID NO: 1545, or a corresponding segment of a Cas9 polypeptide amino acid sequence set forth in any of SEQ ID NOs: 1-259 and 795-1346. In some cases, the first fusion partner is inserted at amino acid 1024 of amino acids 910-1099 of the amino acid sequence of the S. pyogenes Cas9 amino acid sequence set forth in SEQ ID NO: 1545, or a corresponding segment of a Cas9 polypeptide amino acid sequence set forth in any of SEQ ID NOs: 1-259 and 795-1346. In some cases, the first fusion partner is inserted at amino acid 1025 of amino acids 910-1099 of the amino acid sequence of the S. pyogenes Cas9 amino acid sequence set forth in SEQ ID NO: 1545, or a corresponding segment of a Cas9 polypeptide amino acid sequence set forth in any of SEQ ID NOs: 1-259 and 795-1346.

[0260] As one non-limiting example, the first fusion polypeptide can comprise, in order from N-terminus to C-terminus: i) a RuvCI polypeptide; ii) a RuvCII polypeptide; iii) an HNH polypeptide; iv) an N-terminal portion of a RuvCIII polypeptide; v) a first fusion partner; vi) a C-terminal portion of a RuvCIII polypeptide; and v) a PAM-interacting polypeptide.

[0261] An N-terminal portion of a RuvCIII polypeptide can comprise an amino acid sequence having at least 75%, at least 80%, at least 85%, at least 90%, at least 95%, at least 98%, at least 99%, or 100%, amino acid sequence identity to a contiguous stretch of from 80 amino acids to 106 amino acids of amino acids 910 to 1015 of the S. pyogenes Cas9 amino acid sequence set forth in SEQ ID NO: 1545, or a corresponding segment of a Cas9 polypeptide amino acid sequence set forth in any of SEQ ID NOs: 1-259 and 795-1346; and can have a length of from 80 amino acids to 120 amino acids, from 80 amino acids to 90 amino acids, from 90 amino acids to 100 amino acids, from 100 amino acids to 110 amino acids, or from 110 amino acids to 120 amino acids. In some cases, a RuvCIII polypeptide comprises an amino acid sequence having at least 75%, at least 80%, at least 85%, at least 90%, at least 95%, at least 98%, at least 99%, or 100%, amino acid sequence identity to amino acids 910 to 1015 of the S. pyogenes Cas9 amino acid sequence set forth in SEQ ID NO: 1545, or a corresponding segment of a Cas9 polypeptide amino acid sequence set forth in any of SEQ ID NOs: 1-259 and 795-1346; and has a length of from 100 amino acids to 106 amino acids (e.g., 100, 101, 102, 103, 104, 105, 106, 107, 108, 109, or 110 amino acids).

[0262] A C-terminal portion of a RuvCIII polypeptide can comprise an amino acid sequence having at least 75%, at least 80%, at least 85%, at least 90%, at least 95%, at least 98%, at least 99%, or 100%, amino acid sequence identity to a contiguous stretch of from 75 amino acids to 84 amino acids of amino acids 1016 to 1099 of the S. pyogenes Cas9 amino acid sequence set forth in SEQ ID NO: 1545, or a corresponding segment of a Cas9 polypeptide amino acid sequence set forth in any of SEQ ID NOs: 1-259 and 795-1346; and can have a length of from 70 amino acids to 100 amino acids, from 70 amino acids to 80 amino acids, from 80 amino acids to 90 amino acids, or from 90 amino acids to 100 amino acids. In some cases, a C-terminal RuvCIII polypeptide comprises an amino acid sequence having at least 75%, at least 80%, at least 85%, at least 90%, at least 95%, at least 98%, at least 99%, or 100%, amino acid sequence identity to amino acids 1016 to 1099 of the S. pyogenes Cas9 amino acid sequence set forth in SEQ ID NO: 1545, or a corresponding segment of a Cas9 polypeptide amino acid sequence set forth in any of SEQ ID NOs: 1-259 and 795-1346; and has a length of from 80 amino acids to 90 amino acids (e.g., 80, 81, 82, 83, 84, 85, 86, 87, 88, 89, or 90 amino acids).

[0263] For example, in some cases, the first fusion polypeptide comprises, in order from N-terminus to C-terminus: i) a RuvCI polypeptide; ii) a RuvCII polypeptide; iii) an HNH polypeptide; iv) an N-terminal portion of a RuvCIII polypeptide, comprising an amino acid sequence having at least 75%, at least 80%, at least 85%, at least 90%, at least 95%, at least 98%, at least 99%, or 100%, amino acid sequence identity to amino acids 910 to 1010 of the S. pyogenes Cas9 amino acid sequence set forth in SEQ ID NO: 1545, or a corresponding segment of a Cas9 polypeptide amino acid sequence set forth in any of SEQ ID NOs: 1-259 and 795-1346; v) a first fusion partner; vi) a C-terminal portion of a RuvCIII polypeptide comprising an amino acid sequence having at least 75%, at least 80%, at least 85%, at least 90%, at least 95%, at least 98%, at least 99%, or 100%, amino acid sequence identity to amino acids 1011-1099 of the S. pyogenes Cas9 amino acid sequence set forth in SEQ ID NO: 1545, or a corresponding segment of a Cas9 polypeptide amino acid sequence set forth in any of SEQ ID NOs: 1-259 and 795-1346; and vii) a PAM-interacting polypeptide.

[0264] As another example, in some cases, the first fusion polypeptide comprises, in order from N-terminus to C-terminus: i) a RuvCI polypeptide; ii) a RuvCII polypeptide; iii) an HNH polypeptide; iv) an N-terminal portion of a RuvCIII polypeptide, comprising an amino acid sequence having at least 75%, at least 80%, at least 85%, at least 90%, at least 95%, at least 98%, at least 99%, or 100%, amino acid sequence identity to amino acids 910 to 1011 of the S. pyogenes Cas9 amino acid sequence set forth in SEQ ID NO: 1545, or a corresponding segment of a Cas9 polypeptide amino acid sequence set forth in any of SEQ ID NOs: 1-259 and 795-1346; v) a first fusion partner; vi) a C-terminal portion of a RuvCIII polypeptide comprising an amino acid sequence having at least 75%, at least 80%, at least 85%, at least 90%, at least 95%, at least 98%, at least 99%, or 100%, amino acid sequence identity to amino acids 1012-1099 of the S. pyogenes Cas9 amino acid sequence set forth in SEQ ID NO: 1545, or a corresponding segment of a Cas9 polypeptide amino acid sequence set forth in any of SEQ ID NOs: 1-259 and 795-1346; and vii) a PAM-interacting polypeptide.

[0265] As another example, in some cases, the first fusion polypeptide comprises, in order from N-terminus to C-terminus: i) a RuvCI polypeptide; ii) a RuvCII polypeptide; iii) an HNH polypeptide; iv) an N-terminal portion of a RuvCIII polypeptide, comprising an amino acid sequence having at least 75%, at least 80%, at least 85%, at least 90%, at least 95%, at least 98%, at least 99%, or 100%, amino acid sequence identity to amino acids 910 to 1012 of the S. pyogenes Cas9 amino acid sequence set forth in SEQ ID NO: 1545, or a corresponding segment of a Cas9 polypeptide amino acid sequence set forth in any of SEQ ID NOs: 1-259 and 795-1346; v) a first fusion partner; vi) a C-terminal portion of a RuvCIII polypeptide comprising an amino acid sequence having at least 75%, at least 80%, at least 85%, at least 90%, at least 95%, at least 98%, at least 99%, or 100%, amino acid sequence identity to amino acids 1013-1099 of the S. pyogenes Cas9 amino acid sequence set forth in SEQ ID NO: 1545, or a corresponding segment of a Cas9 polypeptide amino acid sequence set forth in any of SEQ ID NOs: 1-259 and 795-1346; and vii) a PAM-interacting polypeptide.

[0266] As another example, in some cases, the first fusion polypeptide comprises, in order from N-terminus to C-terminus: i) a RuvCI polypeptide; ii) a RuvCII polypeptide; iii) an HNH polypeptide; iv) an N-terminal portion of a RuvCIII polypeptide, comprising an amino acid sequence having at least 75%, at least 80%, at least 85%, at least 90%, at least 95%, at least 98%, at least 99%, or 100%, amino acid sequence identity to amino acids 910 to 1013 of the S. pyogenes Cas9 amino acid sequence set forth in SEQ ID NO: 1545, or a corresponding segment of a Cas9 polypeptide amino acid sequence set forth in any of SEQ ID NOs: 1-259 and 795-1346; v) a first fusion partner; vi) a C-terminal portion of a RuvCIII polypeptide comprising an amino acid sequence having at least 75%, at least 80%, at least 85%, at least 90%, at least 95%, at least 98%, at least 99%, or 100%, amino acid sequence identity to amino acids 1014-1099 of the S. pyogenes Cas9 amino acid sequence set forth in SEQ ID NO: 1545, or a corresponding segment of a Cas9 polypeptide amino acid sequence set forth in any of SEQ ID NOs: 1-259 and 795-1346; and vii) a PAM-interacting polypeptide.

[0267] As another example, in some cases, the first fusion polypeptide comprises, in order from N-terminus to C-terminus: i) a RuvCI polypeptide; ii) a RuvCII polypeptide; iii) an HNH polypeptide; iv) an N-terminal portion of a RuvCIII polypeptide, comprising an amino acid sequence having at least 75%, at least 80%, at least 85%, at least 90%, at least 95%, at least 98%, at least 99%, or 100%, amino acid sequence identity to amino acids 910 to 1014 of the S. pyogenes Cas9 amino acid sequence set forth in SEQ ID NO: 1545, or a corresponding segment of a Cas9 polypeptide amino acid sequence set forth in any of SEQ ID NOs: 1-259 and 795-1346; v) a first fusion partner; vi) a C-terminal portion of a RuvCIII polypeptide comprising an amino acid sequence having at least 75%, at least 80%, at least 85%, at least 90%, at least 95%, at least 98%, at least 99%, or 100%, amino acid sequence identity to amino acids 1015-1099 of the S. pyogenes Cas9 amino acid sequence set forth in SEQ ID NO: 1545, or a corresponding segment of a Cas9 polypeptide amino acid sequence set forth in any of SEQ ID NOs: 1-259 and 795-1346; and vii) a PAM-interacting polypeptide.

[0268] As another example, in some cases, the first fusion polypeptide comprises, in order from N-terminus to C-terminus: i) a RuvCI polypeptide; ii) a RuvCII polypeptide; iii) an HNH polypeptide; iv) an N-terminal portion of a RuvCIII polypeptide, comprising an amino acid sequence having at least 75%, at least 80%, at least 85%, at least 90%, at least 95%, at least 98%, at least 99%, or 100%, amino acid sequence identity to amino acids 910 to 1015 of the S. pyogenes Cas9 amino acid sequence set forth in SEQ ID NO: 1545, or a corresponding segment of a Cas9 polypeptide amino acid sequence set forth in any of SEQ ID NOs: 1-259 and 795-1346; v) a first fusion partner; vi) a C-terminal portion of a RuvCIII polypeptide comprising an amino acid sequence having at least 75%, at least 80%, at least 85%, at least 90%, at least 95%, at least 98%, at least 99%, or 100%, amino acid sequence identity to amino acids 1016-1099 of the S. pyogenes Cas9 amino acid sequence set forth in SEQ ID NO: 1545, or a corresponding segment of a Cas9 polypeptide amino acid sequence set forth in any of SEQ ID NOs: 1-259 and 795-1346; and vii) a PAM-interacting polypeptide.

[0269] As another example, in some cases, the first fusion polypeptide comprises, in order from N-terminus to C-terminus: i) a RuvCI polypeptide; ii) a RuvCII polypeptide; iii) an HNH polypeptide; iv) an N-terminal portion of a RuvCIII polypeptide, comprising an amino acid sequence having at least 75%, at least 80%, at least 85%, at least 90%, at least 95%, at least 98%, at least 99%, or 100%, amino acid sequence identity to amino acids 910 to 1016 of the S. pyogenes Cas9 amino acid sequence set forth in SEQ ID NO: 1545, or a corresponding segment of a Cas9 polypeptide amino acid sequence set forth in any of SEQ ID NOs: 1-259 and 795-1346; v) a first fusion partner; vi) a C-terminal portion of a RuvCIII polypeptide comprising an amino acid sequence having at least 75%, at least 80%, at least 85%, at least 90%, at least 95%, at least 98%, at least 99%, or 100%, amino acid sequence identity to amino acids 1017-1099 of the S. pyogenes Cas9 amino acid sequence set forth in SEQ ID NO: 1545, or a corresponding segment of a Cas9 polypeptide amino acid sequence set forth in any of SEQ ID NOs: 1-259 and 795-1346; and vii) a PAM-interacting polypeptide.

[0270] As another example, in some cases, the first fusion polypeptide comprises, in order from N-terminus to C-terminus: i) a RuvCI polypeptide; ii) a RuvCII polypeptide; iii) an HNH polypeptide; iv) an N-terminal portion of a RuvCIII polypeptide, comprising an amino acid sequence having at least 75%, at least 80%, at least 85%, at least 90%, at least 95%, at least 98%, at least 99%, or 100%, amino acid sequence identity to amino acids 910 to 1017 of the S. pyogenes Cas9 amino acid sequence set forth in SEQ ID NO: 1545, or a corresponding segment of a Cas9 polypeptide amino acid sequence set forth in any of SEQ ID NOs: 1-259 and 795-1346; v) a first fusion partner; vi) a C-terminal portion of a RuvCIII polypeptide comprising an amino acid sequence having at least 75%, at least 80%, at least 85%, at least 90%, at least 95%, at least 98%, at least 99%, or 100%, amino acid sequence identity to amino acids 1018-1099 of the S. pyogenes Cas9 amino acid sequence set forth in SEQ ID NO: 1545, or a corresponding segment of a Cas9 polypeptide amino acid sequence set forth in any of SEQ ID NOs: 1-259 and 795-1346; and vii) a PAM-interacting polypeptide.

[0271] As another example, in some cases, the first fusion polypeptide comprises, in order from N-terminus to C-terminus: i) a RuvCI polypeptide; ii) a RuvCII polypeptide; iii) an HNH polypeptide; iv) an N-terminal portion of a RuvCIII polypeptide, comprising an amino acid sequence having at least 75%, at least 80%, at least 85%, at least 90%, at least 95%, at least 98%, at least 99%, or 100%, amino acid sequence identity to amino acids 910 to 1018 of the S. pyogenes Cas9 amino acid sequence set forth in SEQ ID NO: 1545, or a corresponding segment of a Cas9 polypeptide amino acid sequence set forth in any of SEQ ID NOs: 1-259 and 795-1346; v) a first fusion partner; vi) a C-terminal portion of a RuvCIII polypeptide comprising an amino acid sequence having at least 75%, at least 80%, at least 85%, at least 90%, at least 95%, at least 98%, at least 99%, or 100%, amino acid sequence identity to amino acids 1019-1099 of the S. pyogenes Cas9 amino acid sequence set forth in SEQ ID NO: 1545, or a corresponding segment of a Cas9 polypeptide amino acid sequence set forth in any of SEQ ID NOs: 1-259 and 795-1346; and vii) a PAM-interacting polypeptide.

[0272] As another example, in some cases, the first fusion polypeptide comprises, in order from N-terminus to C-terminus: i) a RuvCI polypeptide; ii) a RuvCII polypeptide; iii) an HNH polypeptide; iv) an N-terminal portion of a RuvCIII polypeptide, comprising an amino acid sequence having at least 75%, at least 80%, at least 85%, at least 90%, at least 95%, at least 98%, at least 99%, or 100%, amino acid sequence identity to amino acids 910 to 1019 of the S. pyogenes Cas9 amino acid sequence set forth in SEQ ID NO: 1545, or a corresponding segment of a Cas9 polypeptide amino acid sequence set forth in any of SEQ ID NOs: 1-259 and 795-1346; v) a first fusion partner; vi) a C-terminal portion of a RuvCIII polypeptide comprising an amino acid sequence having at least 75%, at least 80%, at least 85%, at least 90%, at least 95%, at least 98%, at least 99%, or 100%, amino acid sequence identity to amino acids 1020-1099 of the S. pyogenes Cas9 amino acid sequence set forth in SEQ ID NO: 1545, or a corresponding segment of a Cas9 polypeptide amino acid sequence set forth in any of SEQ ID NOs: 1-259 and 795-1346; and vii) a PAM-interacting polypeptide.

[0273] As another example, in some cases, the first fusion polypeptide comprises, in order from N-terminus to C-terminus: i) a RuvCI polypeptide; ii) a RuvCII polypeptide; iii) an HNH polypeptide; iv) an N-terminal portion of a RuvCIII polypeptide, comprising an amino acid sequence having at least 75%, at least 80%, at least 85%, at least 90%, at least 95%, at least 98%, at least 99%, or 100%, amino acid sequence identity to amino acids 910 to 1020 of the S. pyogenes Cas9 amino acid sequence set forth in SEQ ID NO: 1545, or a corresponding segment of a Cas9 polypeptide amino acid sequence set forth in any of SEQ ID NOs: 1-259 and 795-1346; v) a first fusion partner; vi) a C-terminal portion of a RuvCIII polypeptide comprising an amino acid sequence having at least 75%, at least 80%, at least 85%, at least 90%, at least 95%, at least 98%, at least 99%, or 100%, amino acid sequence identity to amino acids 1021-1099 of the S. pyogenes Cas9 amino acid sequence set forth in SEQ ID NO: 1545, or a corresponding segment of a Cas9 polypeptide amino acid sequence set forth in any of SEQ ID NOs: 1-259 and 795-1346; and vii) a PAM-interacting polypeptide.

[0274] As another example, in some cases, the first fusion polypeptide comprises, in order from N-terminus to C-terminus: i) a RuvCI polypeptide; ii) a RuvCII polypeptide; iii) an HNH polypeptide; iv) an N-terminal portion of a RuvCIII polypeptide, comprising an amino acid sequence having at least 75%, at least 80%, at least 85%, at least 90%, at least 95%, at least 98%, at least 99%, or 100%, amino acid sequence identity to amino acids 910 to 1021 of the S. pyogenes Cas9 amino acid sequence set forth in SEQ ID NO: 1545, or a corresponding segment of a Cas9 polypeptide amino acid sequence set forth in any of SEQ ID NOs: 1-259 and 795-1346; v) a first fusion partner; vi) a C-terminal portion of a RuvCIII polypeptide comprising an amino acid sequence having at least 75%, at least 80%, at least 85%, at least 90%, at least 95%, at least 98%, at least 99%, or 100%, amino acid sequence identity to amino acids 1022-1099 of the S. pyogenes Cas9 amino acid sequence set forth in SEQ ID NO: 1545, or a corresponding segment of a Cas9 polypeptide amino acid sequence set forth in any of SEQ ID NOs: 1-259 and 795-1346; and vii) a PAM-interacting polypeptide.

[0275] As another example, in some cases, the first fusion polypeptide comprises, in order from N-terminus to C-terminus: i) a RuvCI polypeptide; ii) a RuvCII polypeptide; iii) an HNH polypeptide; iv) an N-terminal portion of a RuvCIII polypeptide, comprising an amino acid sequence having at least 75%, at least 80%, at least 85%, at least 90%, at least 95%, at least 98%, at least 99%, or 100%, amino acid sequence identity to amino acids 910 to 1022 of the S. pyogenes Cas9 amino acid sequence set forth in SEQ ID NO: 1545, or a corresponding segment of a Cas9 polypeptide amino acid sequence set forth in any of SEQ ID NOs: 1-259 and 795-1346; v) a first fusion partner; vi) a C-terminal portion of a RuvCIII polypeptide comprising an amino acid sequence having at least 75%, at least 80%, at least 85%, at least 90%, at least 95%, at least 98%, at least 99%, or 100%, amino acid sequence identity to amino acids 1023-1099 of the S. pyogenes Cas9 amino acid sequence set forth in SEQ ID NO: 1545, or a corresponding segment of a Cas9 polypeptide amino acid sequence set forth in any of SEQ ID NOs: 1-259 and 795-1346; and vii) a PAM-interacting polypeptide.

[0276] As another example, in some cases, the first fusion polypeptide comprises, in order from N-terminus to C-terminus: i) a RuvCI polypeptide; ii) a RuvCII polypeptide; iii) an HNH polypeptide; iv) an N-terminal portion of a RuvCIII polypeptide, comprising an amino acid sequence having at least 75%, at least 80%, at least 85%, at least 90%, at least 95%, at least 98%, at least 99%, or 100%, amino acid sequence identity to amino acids 910 to 1023 of the S. pyogenes Cas9 amino acid sequence set forth in SEQ ID NO: 1545, or a corresponding segment of a Cas9 polypeptide amino acid sequence set forth in any of SEQ ID NOs: 1-259 and 795-1346; v) a first fusion partner; vi) a C-terminal portion of a RuvCIII polypeptide comprising an amino acid sequence having at least 75%, at least 80%, at least 85%, at least 90%, at least 95%, at least 98%, at least 99%, or 100%, amino acid sequence identity to amino acids 1024-1099 of the S. pyogenes Cas9 amino acid sequence set forth in SEQ ID NO: 1545, or a corresponding segment of a Cas9 polypeptide amino acid sequence set forth in any of SEQ ID NOs: 1-259 and 795-1346; and vii) a PAM-interacting polypeptide.

[0277] As another example, in some cases, the first fusion polypeptide comprises, in order from N-terminus to C-terminus: i) a RuvCI polypeptide; ii) a RuvCII polypeptide; iii) an HNH polypeptide; iv) an N-terminal portion of a RuvCIII polypeptide, comprising an amino acid sequence having at least 75%, at least 80%, at least 85%, at least 90%, at least 95%, at least 98%, at least 99%, or 100%, amino acid sequence identity to amino acids 910 to 1024 of the S. pyogenes Cas9 amino acid sequence set forth in SEQ ID NO: 1545, or a corresponding segment of a Cas9 polypeptide amino acid sequence set forth in any of SEQ ID NOs: 1-259 and 795-1346; v) a first fusion partner; vi) a C-terminal portion of a RuvCIII polypeptide comprising an amino acid sequence having at least 75%, at least 80%, at least 85%, at least 90%, at least 95%, at least 98%, at least 99%, or 100%, amino acid sequence identity to amino acids 1025-1099 of the S. pyogenes Cas9 amino acid sequence set forth in SEQ ID NO: 1545, or a corresponding segment of a Cas9 polypeptide amino acid sequence set forth in any of SEQ ID NOs: 1-259 and 795-1346; and vii) a PAM-interacting polypeptide.

[0278] Second Fusion Polypeptide

[0279] In some cases, the second polypeptide of a Cas9 heterodimer comprises an α-helical lobe (also referred to as “an alpha-helical recognition region”) of a Cas9 polypeptide. For example, in some cases, the second polypeptide comprises an amino acid sequence having at least 75%, at least 80%, at least 85%, at least 90%, at least 95%, at least 98%, at least 99%, or 100%, amino acid sequence identity to a contiguous stretch of from 400 amino acids to 658 amino acids of amino acids 61 to 718 of the S. pyogenes Cas9 amino acid sequence set forth in SEQ ID NO: 1545, or a corresponding segment of a Cas9 polypeptide amino acid sequence set forth in any of SEQ ID NOs: 1-259 and 795-1346; and can have a length of from 400 amino acids to 800 amino acids, e.g., from 400 amino acids to 450 amino acids, from 450 amino acids to 500 amino acids, from 500 amino acids to 550 amino acids, from 550 amino acids to 600 amino acids, from 600 amino acids to 650 amino acids, from 650 amino acids to 700 amino acids, from 700 amino acids to 750 amino acids, or from 750 amino acids to 800 amino acids. In some cases, the second polypeptide comprises an amino acid sequence having at least 75%, at least 80%, at least 85%, at least 90%, at least 95%, at least 98%, at least 99%, or 100%, amino acid sequence identity to amino acids 61-718 of the S. pyogenes Cas9 amino acid sequence set forth in SEQ ID NO: 1545, or a corresponding segment of a Cas9 polypeptide amino acid sequence set forth in any of SEQ ID NOs: 1-259 and 795-1346; and has a length of from 650 amino acids to 660 amino acids (e.g., 650, 651, 652, 653, 654, 655, 656, 657, 658, 659, or 660 amino acids).

[0280] In some cases, the second polypeptide comprises an amino acid sequence having at least 75%, at least 80%, at least 85%, at least 90%, at least 95%, at least 98%, at least 99%, or 100%, amino acid sequence identity to a contiguous stretch of from 400 amino acids to 624 amino acids of amino acids 95 to 718 of the S. pyogenes Cas9 amino acid sequence set forth in SEQ ID NO: 1545, or a corresponding segment of a Cas9 polypeptide amino acid sequence set forth in any of SEQ ID NOs: 1-259 and 795-1346; and has a length of from about 400 amino acids to 800 amino acids, e.g., from 400 amino acids to 450 amino acids, from 450 amino acids to 500 amino acids, from 500 amino acids to 550 amino acids, from 550 amino acids to 600 amino acids, from 600 amino acids to 650 amino acids, from 650 amino acids to 700 amino acids, from 700 amino acids to 750 amino acids, or from 750 amino acids to 800 amino acids. In some cases, the second polypeptide comprises an amino acid sequence having at least 75%, at least 80%, at least 85%, at least 90%, at least 95%, at least 98%, at least 99%, or 100%, amino acid sequence identity to amino acids 95 to 718 of the S. pyogenes Cas9 amino acid sequence set forth in SEQ ID NO: 1545, or a corresponding segment of a Cas9 polypeptide amino acid sequence set forth in any of SEQ ID NOs: 1-259 and 795-1346; and has a length of from 620 amino acids to 630 amino acids (e.g., 620, 621, 622, 623, 624, 625, 626, 627, 628, 629, or 630 amino acids).

[0281] In some cases, G56 (of the S. pyogenes sequence set forth in SEQ ID NO: 1545) can be selected as the N-terminus for the alpha-helical lobe (e.g., due to its location in a poorly-conserved linker just before the arginine-rich bridge helix (“Arg domain”), which has been shown to be critical for Cas9 cleavage activity in human cells). In some cases, the second polypeptide of a Cas9 heterodimer comprises an α-helical lobe (also referred to as “an alpha-helical recognition region”) of a Cas9 polypeptide. For example, in some cases, the second polypeptide comprises an amino acid sequence having at least 75%, at least 80%, at least 85%, at least 90%, at least 95%, at least 98%, at least 99%, or 100%, amino acid sequence identity to a contiguous stretch of from 400 amino acids to 658 amino acids of amino acids 56 to 714 of the S. pyogenes Cas9 amino acid sequence set forth in SEQ ID NO: 1545, or a corresponding segment of a Cas9 polypeptide amino acid sequence set forth in any of SEQ ID NOs: 1-259 and 795-1346; and can have a length of from 400 amino acids to 800 amino acids, e.g., from 400 amino acids to 450 amino acids, from 450 amino acids to 500 amino acids, from 500 amino acids to 550 amino acids, from 550 amino acids to 600 amino acids, from 600 amino acids to 650 amino acids, from 650 amino acids to 700 amino acids, from 700 amino acids to 750 amino acids, or from 750 amino acids to 800 amino acids. In some cases, the second polypeptide comprises an amino acid sequence having at least 75%, at least 80%, at least 85%, at least 90%, at least 95%, at least 98%, at least 99%, or 100%, amino acid sequence identity to amino acids 56-714 of the S. pyogenes Cas9 amino acid sequence set forth in SEQ ID NO: 1545, or a corresponding segment of a Cas9 polypeptide amino acid sequence set forth in any of SEQ ID NOs: 1-259 and 795-1346; and has a length of from 650 amino acids to 660 amino acids (e.g., 650, 651, 652, 653, 654, 655, 656, 657, 658, 659, or 660 amino acids).

[0282] In some cases, the C-terminus of the alpha-helical lobe can be at the beginning, end, or within the linker between the two lobes of the WT Cas9 protein. For example, the C-terminus of the alpha-helical lobe can be at or near S714 of the WT Cas9 protein set forth in SEQ ID NO: 1545. For example, the C-terminus of the alpha-helical lobe can be S714 of the WT Cas9 protein set forth in SEQ ID NO: 1545.

[0283] In some cases, the second fusion polypeptide comprises, in order from N-terminus to C-terminus: a) a second fusion partner; and b) a second polypeptide that comprises an alpha-helical recognition region. In some cases, the second fusion polypeptide comprises, in order from N-terminus to C-terminus: a) a second polypeptide that comprises an alpha-helical recognition region; and b) a second fusion partner.

[0284] In some cases, the second fusion polypeptide comprises a heterologous sequence that provides for subcellular localization (e.g., an NLS for targeting to the nucleus; a mitochondrial localization signal for targeting to the mitochondria; a chloroplast localization signal for targeting to a chloroplast; an ER retention signal; and the like). In some cases, the second fusion polypeptide includes 2 or more, 3 or more, 4 or more, or 5 or more NLSs. In some cases, an NLS is located at or near (e.g., within 75 amino acids, 50 amino acids, or 30 amino acids) the N-terminus and/or at or near (e.g., within 75 amino acids, 50 amino acids, or 30 amino acids) the C-terminus.

[0285] In some cases, the second fusion polypeptide comprises an NLS. For example, in some cases, the second fusion polypeptide comprises, in order from N-terminus to C-terminus: a) an NLS; b) a second fusion partner; and c) a second polypeptide that comprises an alpha-helical recognition region. In some cases, the second fusion polypeptide comprises, in order from N-terminus to C-terminus: a) an NLS; b) a second fusion partner; c) a second polypeptide that comprises an alpha-helical recognition region; and d) an NLS. In some cases, the second fusion polypeptide comprises, in order from N-terminus to C-terminus: a) an NLS; b) a second polypeptide that comprises an alpha-helical recognition region; and c) a second fusion partner. In some cases, the second fusion polypeptide comprises, in order from N-terminus to C-terminus: a) an NLS; b) a second polypeptide that comprises an alpha-helical recognition region; c) a second fusion partner; and d) an NLS. In some cases, the NLS comprises the amino acid sequence MAPKKKRKVGIHGVPAA (SEQ ID NO: 1546). In some cases, the NLS comprises the amino acid sequence KRPAATKKAGQAKKKK (SEQ ID NO: 1547). Other suitable NLS are described elsewhere herein.

[0286] An NLS can be at or near the N-terminus and/or the C-terminus. In some cases, the second fusion polypeptide comprises two or more NLSs (e.g., 3 or more, 4 or more, or 5 or more NLSs). In some cases, the second fusion polypeptide comprises one or more NLSs (e.g., 2 or more, 3 or more, or 4 or more NLSs) at or near the N-terminus and/or one or more NLSs (e.g., 2 or more, 3 or more, or 4 or more NLSs) at or near the C-terminus. The term “at or near” is used here because, as is known in the art, the NLS need not be at the actual terminus of a protein, but can be positioned near (e.g., within 100 amino acids of) an N- and/or C-terminus (e.g., within 80, within 75, within 60, within 55, within 50, within 45, within 40, within 35, or within 30 amino acids of the an N- and/or C-terminus).

[0287] In some cases, the second fusion polypeptide comprises one or more linker polypeptides. For example, a linker polypeptide can be interposed between any of: a) an NLS and a fusion partner; b) a fusion partner and an alpha-helical lobe; and c) an alpha-helical lobe and an NLS. Suitable linker polypeptides are described elsewhere herein.

[0288] Cas9 Heterodimer Comprising a Circularly Permuted Polypeptide

[0289] In some embodiments, the Cas9 nuclease lobe of a Cas9 heterodimer is a circular permutant. As used herein, the term “circular permutant” refers to a variant polypeptide (e.g., of a subject Cas9 heterodimer) in which one section of the primary amino acid sequence has been moved to a different position within the primary amino acid sequence of the polypeptide, but where the local order of amino acids has not been changed, and where the three dimensional architecture of the protein is conserved. For example, a circular permutant of a wild type 500 amino acid polypeptide may have an N-terminal residue of residue number 50 (relative to the wild type protein), where residues 1-49 of the wild type protein are added the C-terminus. Such a circular permutant, relative to the wild type protein sequence would have, from N-terminus to C-terminus, amino acid numbers 50-500 followed by 1-49 (amino acid 49 would be the C-terminal residue). Thus, such an example circular permutant would have the same total number of amino acids as the wild type reference protein, and the amino acids would even be in the same order (locally), but the overall primary amino acid sequence is changed.

[0290] In some embodiments, a Cas9 heterodimer comprises: a) a first, circularly permuted, polypeptide comprising: a RuvCI polypeptide; ii) a RuvCII polypeptide; iii) an HNH polypeptide; iv) a RuvCIII polypeptide; and v) a PAM-interacting polypeptide; where the first polypeptide comprises a first member of a dimerization pair; and b) a second polypeptide comprising an alpha-helical recognition region and a second member of a dimerization pair.

[0291] For example, in some cases, a Cas9 heterodimer comprises: A) a first fusion polypeptide comprising: a) a first, circular permuted, polypeptide that comprises: i) a RuvCI polypeptide; ii) a RuvCII polypeptide; iii) an HNH polypeptide; iv) a RuvCIII polypeptide; and v) a PAM-interacting polypeptide; and b) a first fusion partner, where the first fusion partner is a first member of a dimerization pair; and B) a second fusion polypeptide comprising: a) a second polypeptide that comprises an alpha-helical recognition region; and b) a second fusion partner, where the second fusion partner is a second member of the dimerization pair.

[0292] First Fusion Polypeptide

[0293] As described above, a Cas9 heterodimer comprises: A) a first fusion polypeptide comprising: a) a first, circular permuted, polypeptide that comprises: i) a RuvCI polypeptide; ii) a RuvCII polypeptide; iii) an HNH polypeptide; iv) a RuvCIII polypeptide; and v) a PAM-interacting polypeptide; and b) a first fusion partner, where the first fusion partner is a first member of a dimerization pair; and B) a second fusion polypeptide comprising: a) a second polypeptide that comprises an alpha-helical recognition region; and b) a second fusion partner, where the second fusion partner is a second member of the dimerization pair. In some cases, the first fusion partner (first member of the dimerization pair) is covalently linked, directly or via a linker, at or near (e.g., within 1 to 50 amino acids of) the amino terminus (N-terminus) of the first, circular permuted, polypeptide. In some cases, the first member of the dimerization pair is covalently linked, directly or via a linker, at or near (e.g., within 1 to 50 amino acids of) the carboxyl terminus (C-terminus) of the first, circular permuted, polypeptide. In some cases, the first polypeptide comprises a nuclease lobe of a Cas9 polypeptide.

[0294] In some cases, a first fusion polypeptide comprises one or more linker polypeptides. A linker polypeptide can be interposed between any of the various possible components (polypeptides) of a first fusion polypeptide. Examples of suitable positions for a linker polypeptide include, but are not limited to, interposed between: a) an NLS and a fusion partner; b) a fusion partner and a RuvCII polypeptide; c) a PAM-interacting polypeptide and a RuvCI polypeptide; d) a RuvCI polypeptide and an NLS; e) a RuvCI polypeptide and a fusion partner; and f) a RuvCI polypeptide and a RuvCII polypeptide.

[0295] The linker polypeptide may have any of a variety of amino acid sequences. Proteins can be joined by a spacer peptide, generally of a flexible nature, although other chemical linkages are not excluded. Currently, it is contemplated that the most useful linker sequences will generally be peptides of between about 6 and about 40 amino acids in length, or between about 6 and about 25 amino acids in length. These linkers are generally produced by using synthetic, linker-encoding oligonucleotides to couple the proteins. Peptide linkers with a degree of flexibility will generally be preferred. The linking peptides may have virtually any amino acid sequence, bearing in mind that the preferred linkers will have a sequence that results in a generally flexible peptide. The use of small amino acids, such as glycine and alanine, are of use in creating a flexible peptide. The creation of such sequences is routine to those of skill in the art. A variety of different linkers are commercially available and are considered suitable for use.

[0296] Exemplary polypeptide linkers include glycine polymers (G)ₙ, glycine-serine polymers (including, for example, (GS)ₙ, GSGGSₙ (SEQ ID NO: 1548) and GGGSₙ (SEQ ID NO: 1549), where n is an integer of at least one), glycine-alanine polymers, alanine-serine polymers. Exemplary linkers can comprise amino acid sequences including, but not limited to, GGSG (SEQ ID NO: 1550), GGSGG (SEQ ID NO: 1551), GSGSG (SEQ ID NO: 1552), GSGGG (SEQ ID NO: 1553), GGGSG (SEQ ID NO: 1554), GSSSG (SEQ ID NO: 1555), and the like. The ordinarily skilled artisan will recognize that design of a peptide conjugated to any elements described above can include linkers that are all or partially flexible, such that the linker can include a flexible linker as well as one or more portions that confer less flexible structure.

[0297] Cas9 Nuclease Lobe Circular Permutant 1

[0298] In some cases, the first fusion polypeptide comprises, in order from N-terminus to C-terminus: a) a first fusion partner; and b) a first polypeptide comprising: i) a RuvCII polypeptide; ii) an HNH polypeptide; iii) a RuvCIII polypeptide; iv) a PAM-interacting polypeptide; and v) a RuvCI polypeptide. In some cases, the first fusion polypeptide comprises, in order from N-terminus to C-terminus: a) a first polypeptide comprising: i) a RuvCII polypeptide; ii) an HNH polypeptide; iii) a RuvCIII polypeptide; iv) a PAM-interacting polypeptide; and v) a RuvCI polypeptide; and b) a first fusion partner. In some cases, the first fusion partner is a first member of a dimerization pair. Suitable first members of a dimerization pair are described herein.

[0299] In some cases, the first fusion polypeptide comprises a heterologous sequence that provides for subcellular localization (e.g., a nuclear localization signal (NLS) for targeting to the nucleus; a mitochondrial localization signal for targeting to the mitochondria; a chloroplast localization signal for targeting to a chloroplast; an ER retention signal; and the like). In some cases, the first fusion polypeptide includes 2 or more, 3 or more, 4 or more, or 5 or more NLSs. In some cases, an NLS is located at or near (e.g., within 75 amino acids, 50 amino acids, or 30 amino acids) the N-terminus and/or at or near (e.g., within 75 amino acids, 50 amino acids, or 30 amino acids) the C-terminus. In some cases, the first fusion polypeptide comprises a nuclear localization signal (NLS). For example, in some cases, the first fusion polypeptide comprises, in order from N-terminus to C-terminus: a) an NLS; b) a first fusion partner; and c) a first polypeptide comprising: i) a RuvCII polypeptide; ii) an HNH polypeptide; iii) a RuvCIII polypeptide; iv) a PAM-interacting polypeptide; and v) a RuvCI polypeptide. In some cases, the first fusion polypeptide comprises, in order from N-terminus to C-terminus: a) an NLS; b) a first fusion partner; c) a first polypeptide comprising: i) a RuvCII polypeptide; ii) an HNH polypeptide; iii) a RuvCIII polypeptide; iv) a PAM-interacting polypeptide; and v) a RuvCI polypeptide; and d) an NLS. In some cases, the first fusion polypeptide comprises, in order from N-terminus to C-terminus: a) an NLS; b) a first polypeptide comprising: i) a RuvCII polypeptide; ii) an HNH polypeptide; iii) a RuvCIII polypeptide; iv) a PAM-interacting polypeptide; and v) a RuvCI polypeptide; and c) a first fusion partner. In some cases, the first fusion polypeptide comprises, in order from N-terminus to C-terminus: a) a first polypeptide comprising: i) a RuvCII polypeptide; ii) an HNH polypeptide; iii) a RuvCIII polypeptide; iv) a PAM-interacting polypeptide; and v) a RuvCI polypeptide; b) a first fusion partner; and c) an NLS. In some cases, the first fusion polypeptide comprises, in order from N-terminus to C-terminus: a) a first fusion partner; b a first polypeptide comprising: i) a RuvCII polypeptide; ii) an HNH polypeptide; iii) a RuvCIII polypeptide; iv) a PAM-interacting polypeptide; and v) a RuvCI polypeptide; and c) an NLS. In some cases, the first fusion partner is a first member of a dimerization pair. In some cases, the NLS comprises the amino acid sequence MAPKKKRKVGIHGVPAA (SEQ ID NO: 1546). In some cases, the NLS comprises the amino acid sequence KRPAATKKAGQAKKKK (SEQ ID NO: 1547). Other suitable NLS are described elsewhere herein.

[0300] An NLS can be at or near the N-terminus and/or the C-terminus. In some cases, the first fusion polypeptide comprises two or more NLSs (e.g., 3 or more, 4 or more, or 5 or more NLSs). In some cases, the first fusion polypeptide comprises one or more NLSs (e.g., 2 or more, 3 or more, or 4 or more NLSs) at or near the N-terminus and/or one or more NLSs (e.g., 2 or more, 3 or more, or 4 or more NLSs) at or near the C-terminus. The term “at or near” is used here because, as is known in the art, the NLS need not be at the actual terminus of a protein, but can be positioned near (e.g., within 100 amino acids of) an N- and/or C-terminus (e.g., within 80, within 75, within 60, within 55, within 50, within 45, within 40, within 35, or within 30 amino acids of the an N- and/or C-terminus).

[0301] A RuvCII polypeptide can comprise an amino acid sequence having at least 75%, at least 80%, at least 85%, at least 90%, at least 95%, at least 98%, at least 99%, or 100%, amino acid sequence identity to a contiguous stretch of from 40 to 57 amino acids of amino acids 718-774 of the S. pyogenes Cas9 amino acid sequence set forth in SEQ ID NO: 1545, or a corresponding segment of a Cas9 polypeptide amino acid sequence set forth in any of SEQ ID NOs: 1-259 and 795-1346; and can have a length of from 40 amino acids to about 70 amino acids, e.g., from 40 amino acids to 45 amino acids, from 45 amino acids to 50 amino acids, from 50 amino acids to 55 amino acids, from 55 amino acids to 60 amino acids, from 60 amino acids to 65 amino acids, or from 65 amino acids to 70 amino acids. In some cases, a RuvCII polypeptide comprises an amino acid sequence having at least 75%, at least 80%, at least 85%, at least 90%, at least 95%, at least 98%, at least 99%, or 100%, amino acid sequence identity to amino acids 718-774 of the S. pyogenes Cas9 amino acid sequence set forth in SEQ ID NO: 1545, or a corresponding segment of a Cas9 polypeptide amino acid sequence set forth in any of SEQ ID NOs: 1-259 and 795-1346; and has a length of 55-60 (e.g., 55, 56, 57, 58, 59, or 60) amino acids.

[0302] A RuvCII polypeptide can comprise an amino acid sequence having at least 75%, at least 80%, at least 85%, at least 90%, at least 95%, at least 98%, at least 99%, or 100%, amino acid sequence identity to a contiguous stretch of from 40 to 46 amino acids of amino acids 729-775 of the S. pyogenes Cas9 amino acid sequence set forth in SEQ ID NO: 1545, or a corresponding segment of a Cas9 polypeptide amino acid sequence set forth in any of SEQ ID NOs: 1-259 and 795-1346; and can have a length of from 40 amino acids to about 60 amino acids, e.g., from 40 amino acids to 45 amino acids, from 45 amino acids to 50 amino acids, from 50 amino acids to 55 amino acids, or from 55 amino acids to 60 amino acids. In some cases, a RuvCII polypeptide comprises an amino acid sequence having at least 75%, at least 80%, at least 85%, at least 90%, at least 95%, at least 98%, at least 99%, or 100%, amino acid sequence identity to amino acids 728-774 of the S. pyogenes Cas9 amino acid sequence set forth in SEQ ID NO: 1545, or a corresponding segment of a Cas9 polypeptide amino acid sequence set forth in any of SEQ ID NOs: 1-259 and 795-1346; and has a length of 45-50 (e.g., 45, 46, 47, 48, 49, or 50) amino acids.

[0303] An HNH polypeptide can comprise an amino acid sequence having at least 75%, at least 80%, at least 85%, at least 90%, at least 95%, at least 98%, at least 99%, or 100%, amino acid sequence identity to a contiguous stretch of from 100 to 134 amino acids of amino acids 776-909 of the S. pyogenes Cas9 amino acid sequence set forth in SEQ ID NO: 1545, or a corresponding segment of a Cas9 polypeptide amino acid sequence set forth in any of SEQ ID NOs: 1-259 and 795-1346; and can have a length of from 90 amino acids to 150 amino acids, e.g., from 90 amino acids to 95 amino acids, from 95 to amino acids to 100 amino acids, from 100 amino acids to 125 amino acids, from 125 amino acids to 130 amino acids, from 130 amino acids to 135 amino acids, from 135 amino acids to 140 amino acids, from 140 amino acids to 145 amino acids, or from 145 amino acids to 150 amino acids. In some cases, an HNH polypeptide comprises an amino acid sequence having at least 75%, at least 80%, at least 85%, at least 90%, at least 95%, at least 98%, at least 99%, or 100%, amino acid sequence identity to amino acids 776-909 of the S. pyogenes Cas9 amino acid sequence set forth in SEQ ID NO: 1545, or a corresponding segment of a Cas9 polypeptide amino acid sequence set forth in any of SEQ ID NOs: 1-259 and 795-1346; and has a length of from 130 amino acids to 140 amino acids (e.g., 130, 131, 132, 133, 134, 135, 136, 137, 138, 139, or 140 amino acids).

[0304] A RuvCIII polypeptide can comprise an amino acid sequence having at least 75%, at least 80%, at least 85%, at least 90%, at least 95%, at least 98%, at least 99%, or 100%, amino acid sequence identity to a contiguous stretch of from 150 amino acids to 190 amino acids of amino acids 910 to 1099 of the S. pyogenes Cas9 amino acid sequence set forth in SEQ ID NO: 1545, or a corresponding segment of a Cas9 polypeptide amino acid sequence set forth in any of SEQ ID NOs: 1-259 and 795-1346; and can have a length of from 150 amino acids to 160 amino acids, from 160 amino acids to 170 amino acids, from 170 amino acids to 180 amino acids, from 180 amino acids to 190 amino acids, from 190 amino acids to 200 amino acids, from 200 amino acids to 210 amino acids, or from 210 amino acids to 220 amino acids. In some cases, a RuvCIII polypeptide comprises an amino acid sequence having at least 75%, at least 80%, at least 85%, at least 90%, at least 95%, at least 98%, at least 99%, or 100%, amino acid sequence identity to amino acids 910 to 1099 of the S. pyogenes Cas9 amino acid sequence set forth in SEQ ID NO: 1545, or a corresponding segment of a Cas9 polypeptide amino acid sequence set forth in any of SEQ ID NOs: 1-259 and 795-1346; and has a length of from 180 amino acids to 190 amino acids (e.g., 180, 181, 182, 183, 184, 185, 186, 187, 188, 189, or 190 amino acids).

[0305] A PAM-interacting polypeptide can comprise an amino acid sequence having at least 75%, at least 80%, at least 85%, at least 90%, at least 95%, at least 98%, at least 99%, or 100%, amino acid sequence identity to a contiguous stretch of from 200 amino acids to 268 amino acids of amino acids 1100 to 1367 of the S. pyogenes Cas9 amino acid sequence set forth in SEQ ID NO: 1545, or a corresponding segment of a Cas9 polypeptide amino acid sequence set forth in any of SEQ ID NOs: 1-259 and 795-1346; and can have a length of from 240 amino acids to 280 amino acids, e.g., from 240 amino acids to 250 amino acids, from 250 amino acids to 260 amino acids, from 260 amino acids to 270 amino acids, or from 270 amino acids to 280 amino acids. In some cases, a PAM-interacting polypeptide comprises an amino acid sequence having at least 75%, at least 80%, at least 85%, at least 90%, at least 95%, at least 98%, at least 99%, or 100%, amino acid sequence identity to amino acids 1100 to 1367 of the S. pyogenes Cas9 amino acid sequence set forth in SEQ ID NO: 1545, or a corresponding segment of a Cas9 polypeptide amino acid sequence set forth in any of SEQ ID NOs: 1-259 and 795-1346; and has a length of from 260 amino acids to 270 amino acids (e.g., 260, 261, 262, 263, 264, 265, 266, 267, 268, 269, or 270 amino acids).

[0306] A RuvCI polypeptide can comprise an amino acid sequence having at least 75%, at least 80%, at least 85%, at least 90%, at least 95%, at least 98%, at least 99%, or 100%, amino acid sequence identity to a contiguous stretch of from 40 amino acids to 60 amino acids of amino acids 1-60 of the S. pyogenes Cas9 amino acid sequence set forth in SEQ ID NO: 1545, or a corresponding segment of a Cas9 polypeptide amino acid sequence set forth in any of SEQ ID NOs: 1-259 and 795-1346; and can have a length of from 40 amino acids to 80 amino acids, e.g., from 40 amino acids to 50 amino acids, from 50 amino acids to 60 amino acids, from 60 amino acids to 70 amino acids, or from 70 amino acids to 80 amino acids. In some cases, a RuvCI polypeptide comprises an amino acid sequence having at least 75%, at least 80%, at least 85%, at least 90%, at least 95%, at least 98%, at least 99%, or 100%, amino acid sequence identity to amino acids 1-60 of the S. pyogenes Cas9 amino acid sequence set forth in SEQ ID NO: 1545, or a corresponding segment of a Cas9 polypeptide amino acid sequence set forth in any of SEQ ID NOs: 1-259 and 795-1346; and has a length of from 50 amino acids to 60 amino acids (e.g., 50, 51, 52, 53, 54, 55, 56, 57, 58, 59, or 60 amino acids).

[0307] Cas9 Nuclease Lobe Circular Permutant 2

[0308] In some cases, the first fusion polypeptide comprises, in order from N-terminus to C-terminus: a) a first fusion partner; and b) a first polypeptide comprising: i) a C-terminal portion of an HNH polypeptide; ii) a RuvCIII polypeptide; iii) a PAM-interacting polypeptide; v) a RuvCI polypeptide; vi) a RuvCII polypeptide; and vi) an N-terminal portion of an HNH polypeptide. In some cases, the first fusion polypeptide comprises, in order from N-terminus to C-terminus: a) a first polypeptide comprising: i) a C-terminal portion of an HNH polypeptide; ii) a RuvCIII polypeptide; iii) a PAM-interacting polypeptide; v) a RuvCI polypeptide; vi) a RuvCII polypeptide; and vi) an N-terminal portion of an HNH polypeptide; and b) a first fusion partner. In some cases, the first fusion partner is a first member of a dimerization pair. Suitable first members of a dimerization pair are described herein.

[0309] In some cases, the first fusion polypeptide comprises a heterologous sequence that provides for subcellular localization (e.g., a nuclear localization signal (NLS) for targeting to the nucleus; a mitochondrial localization signal for targeting to the mitochondria; a chloroplast localization signal for targeting to a chloroplast; an ER retention signal; and the like). In some cases, the first fusion polypeptide includes 2 or more, 3 or more, 4 or more, or 5 or more NLSs. In some cases, an NLS is located at or near (e.g., within 75 amino acids, 50 amino acids, or 30 amino acids) the N-terminus and/or at or near (e.g., within 75 amino acids, 50 amino acids, or 30 amino acids) the C-terminus. In some cases, the first fusion polypeptide comprises a nuclear localization signal (NLS).

[0310] In some cases, the first fusion polypeptide comprises, in order from N-terminus to C-terminus: a) an NLS; b) a first fusion partner; and c) a first polypeptide comprising: i) a C-terminal portion of an HNH polypeptide; ii) a RuvCIII polypeptide; iii) a PAM-interacting polypeptide; v) a RuvCI polypeptide; vi) a RuvCII polypeptide; and vi) an N-terminal portion of an HNH polypeptide. In some cases, the first fusion polypeptide comprises, in order from N-terminus to C-terminus: a) a first polypeptide comprising: i) a C-terminal portion of an HNH polypeptide; ii) a RuvCIII polypeptide; iii) a PAM-interacting polypeptide; v) a RuvCI polypeptide; vi) a RuvCII polypeptide; and vi) an N-terminal portion of an HNH polypeptide; b) a first fusion partner; and c) an NLS. In some cases, the first fusion polypeptide comprises, in order from N-terminus to C-terminus: a) an NLS; b) a first fusion partner; c) a first polypeptide comprising: i) a C-terminal portion of an HNH polypeptide; ii) a RuvCIII polypeptide; iii) a PAM-interacting polypeptide; v) a RuvCI polypeptide; vi) a RuvCII polypeptide; and vi) an N-terminal portion of an HNH polypeptide; and d) an NLS. In some cases, the NLS comprises the amino acid sequence MAPKKKRKVGIHGVPAA (SEQ ID NO: 1546). In some cases, the NLS comprises the amino acid sequence KRPAATKKAGQAKKKK (SEQ ID NO: 1547). Other suitable NLS are described elsewhere herein. In some cases, the first fusion partner is a first member of a dimerization pair.

[0311] An NLS can be at or near the N-terminus and/or the C-terminus. In some cases, the first fusion polypeptide comprises two or more NLSs (e.g., 3 or more, 4 or more, or 5 or more NLSs). In some cases, the first fusion polypeptide comprises one or more NLSs (e.g., 2 or more, 3 or more, or 4 or more NLSs) at or near the N-terminus and/or one or more NLSs (e.g., 2 or more, 3 or more, or 4 or more NLSs) at or near the C-terminus. The term “at or near” is used here because, as is known in the art, the NLS need not be at the actual terminus of a protein, but can be positioned near (e.g., within 100 amino acids of) an N- and/or C-terminus (e.g., within 80, within 75, within 60, within 55, within 50, within 45, within 40, within 35, or within 30 amino acids of the an N- and/or C-terminus).

[0312] In some cases, a first fusion polypeptide comprises one or more linker polypeptides. For example, a linker polypeptide can be interposed between any of: a) an NLS and a fusion partner; b) a fusion partner and a C-terminal portion of an HNH polypeptide; c) a PAM-interacting polypeptide and a RuvCI polypeptide; and d) an N-terminal portion of an HNH polypeptide and a fusion partner. Suitable linker polypeptides are as described above.

[0313] A C-terminal portion of an HNH polypeptide can comprise an amino acid sequence having at least 75%, at least 80%, at least 85%, at least 90%, at least 95%, at least 98%, at least 99%, or 100%, amino acid sequence identity to a contiguous stretch of from 35 to 42 amino acids of amino acids 868-909 of the S. pyogenes Cas9 amino acid sequence set forth in SEQ ID NO: 1545, or a corresponding segment of a Cas9 polypeptide amino acid sequence set forth in any of SEQ ID NOs: 1-259 and 795-1346; and can have a length of from 35 to 42 amino acids (e.g., 35, 36, 37, 38, 39, 40, 41, or 42 amino acids). A C-terminal portion of an HNH polypeptide can comprise an amino acid sequence having at least 75%, at least 80%, at least 85%, at least 90%, at least 95%, at least 98%, at least 99%, or 100%, amino acid sequence identity to a contiguous stretch of from 50 amino acids to 67 amino acids of amino acids 842-909 of the S. pyogenes Cas9 amino acid sequence set forth in SEQ ID NO: 1545, or a corresponding segment of a Cas9 polypeptide amino acid sequence set forth in any of SEQ ID NOs: 1-259 and 795-1346; and can have a length of from 50 amino acids to 80 amino acids, e.g., from 50 amino acids to 60 amino acids, from 60 amino acids to 70 amino acids, or from 70 amino acids to 80 amino acids.

[0314] An N-terminal portion of an HNH polypeptide can comprise an amino acid sequence having at least 75%, at least 80%, at least 85%, at least 90%, at least 95%, at least 98%, at least 99%, or 100%, amino acid sequence identity to a contiguous stretch of from 80 amino acids to 92 amino acids of amino acids 776 to 867 of the S. pyogenes Cas9 amino acid sequence set forth in SEQ ID NO: 1545, or a corresponding segment of a Cas9 polypeptide amino acid sequence set forth in any of SEQ ID NOs: 1-259 and 795-1346; and can have a length of from 80 amino acids to 110 amino acids, e.g., from 80 amino acids to 90 amino acids, from 90 amino acids to 100 amino acids, or from 100 amino acids to 110 amino acids. In some cases, an N-terminal portion of an HNH polypeptide comprises an amino acid sequence having at least 75%, at least 80%, at least 85%, at least 90%, at least 95%, at least 98%, at least 99%, or 100%, amino acid sequence identity to amino acids 776 to 867 of the S. pyogenes Cas9 amino acid sequence set forth in SEQ ID NO: 1545, or a corresponding segment of a Cas9 polypeptide amino acid sequence set forth in any of SEQ ID NOs: 1-259 and 795-1346; and has a length of 85 amino acids to 95 amino acids (85, 86, 87, 88, 89, 90, 91, 92, 93, 94, or 95 amino acids). An N-terminal portion of an HNH polypeptide can comprise an amino acid sequence having at least 75%, at least 80%, at least 85%, at least 90%, at least 95%, at least 98%, at least 99%, or 100%, amino acid sequence identity to a contiguous stretch of from 50 amino acids to 66 amino acids of amino acids 776-841 of the S. pyogenes Cas9 amino acid sequence set forth in SEQ ID NO: 1545, or a corresponding segment of a Cas9 polypeptide amino acid sequence set forth in any of SEQ ID NOs: 1-259 and 795-1346; and can have a length of from 50 amino acids to 80 amino acids, e.g., from 50 amino acids to 60 amino acids, from 60 amino acids to 70 amino acids, or from 70 amino acids to 80 amino acids.

[0315] A RuvCIII polypeptide can comprise an amino acid sequence having at least 75%, at least 80%, at least 85%, at least 90%, at least 95%, at least 98%, at least 99%, or 100%, amino acid sequence identity to a contiguous stretch of from 150 amino acids to 190 amino acids of amino acids 910 to 1099 of the S. pyogenes Cas9 amino acid sequence set forth in SEQ ID NO: 1545, or a corresponding segment of a Cas9 polypeptide amino acid sequence set forth in any of SEQ ID NOs: 1-259 and 795-1346; and can have a length of from 150 amino acids to 160 amino acids, from 160 amino acids to 170 amino acids, from 170 amino acids to 180 amino acids, from 180 amino acids to 190 amino acids, from 190 amino acids to 200 amino acids, from 200 amino acids to 210 amino acids, or from 210 amino acids to 220 amino acids. In some cases, a RuvCIII polypeptide comprises an amino acid sequence having at least 75%, at least 80%, at least 85%, at least 90%, at least 95%, at least 98%, at least 99%, or 100%, amino acid sequence identity to amino acids 910 to 1099 of the S. pyogenes Cas9 amino acid sequence set forth in SEQ ID NO: 1545, or a corresponding segment of a Cas9 polypeptide amino acid sequence set forth in any of SEQ ID NOs: 1-259 and 795-1346; and has a length of from 180 amino acids to 190 amino acids (e.g., 180, 181, 182, 183, 184, 185, 186, 187, 188, 189, or 190 amino acids).

[0316] A PAM-interacting polypeptide can comprise an amino acid sequence having at least 75%, at least 80%, at least 85%, at least 90%, at least 95%, at least 98%, at least 99%, or 100%, amino acid sequence identity to a contiguous stretch of from 200 amino acids to 268 amino acids of amino acids 1100 to 1367 of the S. pyogenes Cas9 amino acid sequence set forth in SEQ ID NO: 1545, or a corresponding segment of a Cas9 polypeptide amino acid sequence set forth in any of SEQ ID NOs: 1-259 and 795-1346; and can have a length of from 240 amino acids to 280 amino acids, e.g., from 240 amino acids to 250 amino acids, from 250 amino acids to 260 amino acids, from 260 amino acids to 270 amino acids, or from 270 amino acids to 280 amino acids. In some cases, a PAM-interacting polypeptide comprises an amino acid sequence having at least 75%, at least 80%, at least 85%, at least 90%, at least 95%, at least 98%, at least 99%, or 100%, amino acid sequence identity to amino acids 1100 to 1367 of the S. pyogenes Cas9 amino acid sequence set forth in SEQ ID NO: 1545, or a corresponding segment of a Cas9 polypeptide amino acid sequence set forth in any of SEQ ID NOs: 1-259 and 795-1346; and has a length of from 260 amino acids to 270 amino acids (e.g., 260, 261, 262, 263, 264, 265, 266, 267, 268, 269, or 270 amino acids).

[0317] A RuvCI polypeptide can comprise an amino acid sequence having at least 75%, at least 80%, at least 85%, at least 90%, at least 95%, at least 98%, at least 99%, or 100%, amino acid sequence identity to a contiguous stretch of from 40 amino acids to 60 amino acids of amino acids 1-60 of the S. pyogenes Cas9 amino acid sequence set forth in SEQ ID NO: 1545, or a corresponding segment of a Cas9 polypeptide amino acid sequence set forth in any of SEQ ID NOs: 1-259 and 795-1346; and can have a length of from 40 amino acids to 80 amino acids, e.g., from 40 amino acids to 50 amino acids, from 50 amino acids to 60 amino acids, from 60 amino acids to 70 amino acids, or from 70 amino acids to 80 amino acids. In some cases, a RuvCI polypeptide comprises an amino acid sequence having at least 75%, at least 80%, at least 85%, at least 90%, at least 95%, at least 98%, at least 99%, or 100%, amino acid sequence identity to amino acids 1-60 of the S. pyogenes Cas9 amino acid sequence set forth in SEQ ID NO: 1545, or a corresponding segment of a Cas9 polypeptide amino acid sequence set forth in any of SEQ ID NOs: 1-259 and 795-1346; and has a length of from 50 amino acids to 60 amino acids (e.g., 50, 51, 52, 53, 54, 55, 56, 57, 58, 59, or 60 amino acids).

[0318] A RuvCII polypeptide can comprise an amino acid sequence having at least 75%, at least 80%, at least 85%, at least 90%, at least 95%, at least 98%, at least 99%, or 100%, amino acid sequence identity to a contiguous stretch of from 40 to 46 amino acids of amino acids 729-775 of the S. pyogenes Cas9 amino acid sequence set forth in SEQ ID NO: 1545, or a corresponding segment of a Cas9 polypeptide amino acid sequence set forth in any of SEQ ID NOs: 1-259 and 795-1346; and can have a length of from 40 amino acids to about 60 amino acids, e.g., from 40 amino acids to 45 amino acids, from 45 amino acids to 50 amino acids, from 50 amino acids to 55 amino acids, or from 55 amino acids to 60 amino acids. In some cases, a RuvCII polypeptide comprises an amino acid sequence having at least 75%, at least 80%, at least 85%, at least 90%, at least 95%, at least 98%, at least 99%, or 100%, amino acid sequence identity to amino acids 728-774 of the S. pyogenes Cas9 amino acid sequence set forth in SEQ ID NO: 1545, or a corresponding segment of a Cas9 polypeptide amino acid sequence set forth in any of SEQ ID NOs: 1-259 and 795-1346; and has a length of 45-50 (e.g., 45, 46, 47, 48, 49, or 50) amino acids.

[0319] Cas9 Nuclease Lobe Circular Permutant 3

[0320] In some cases, the first fusion polypeptide comprises, in order from N-terminus to C-terminus: a) a first fusion partner; and b) a first polypeptide comprising: i) an HNH polypeptide; ii) a RuvCIII polypeptide; iii) a PAM-interacting polypeptide; iv) a RuvCI polypeptide; and vi) a RuvCII polypeptide. In some cases, the first fusion polypeptide comprises, in order from N-terminus to C-terminus: a) a first polypeptide comprising: i) an HNH polypeptide; ii) a RuvCIII polypeptide; iii) a PAM-interacting polypeptide; iv) a RuvCI polypeptide; and vi) a RuvCII polypeptide; and b) a first fusion partner. In some cases, the first fusion partner is a first member of a dimerization pair. Suitable first members of a dimerization pair are described herein.

[0321] In some cases, the first fusion polypeptide comprises a heterologous sequence that provides for subcellular localization (e.g., a nuclear localization signal (NLS) for targeting to the nucleus; a mitochondrial localization signal for targeting to the mitochondria; a chloroplast localization signal for targeting to a chloroplast; an ER retention signal; and the like). In some cases, the first fusion polypeptide includes 2 or more, 3 or more, 4 or more, or 5 or more NLSs. In some cases, an NLS is located at or near (e.g., within 75 amino acids, 50 amino acids, or 30 amino acids) the N-terminus and/or at or near (e.g., within 75 amino acids, 50 amino acids, or 30 amino acids) the C-terminus. In some cases, the first fusion polypeptide comprises a nuclear localization signal (NLS).

[0322] In some cases, the first fusion polypeptide comprises, in order from N-terminus to C-terminus: a) an NLS; b) a first fusion partner; and c) a first polypeptide comprising: i) an HNH polypeptide; ii) a RuvCIII polypeptide; iii) a PAM-interacting polypeptide; iv) a RuvCI polypeptide; and vi) a RuvCII polypeptide. In some cases, the first fusion polypeptide comprises, in order from N-terminus to C-terminus: a) a first polypeptide comprising: i) an HNH polypeptide; ii) a RuvCIII polypeptide; iii) a PAM-interacting polypeptide; iv) a RuvCI polypeptide; and vi) a RuvCII polypeptide; b) a first fusion partner; and c) an NLS. In some cases, the first fusion polypeptide comprises, in order from N-terminus to C-terminus: a) an NLS; b) a first fusion partner; c) a first polypeptide comprising: i) an HNH polypeptide; ii) a RuvCIII polypeptide; iii) a PAM-interacting polypeptide; iv) a RuvCI polypeptide; and vi) a RuvCII polypeptide; and d) an NLS. In some cases, the NLS comprises the amino acid sequence MAPKKKRKVGIHGVPAA (SEQ ID NO: 1546). In some cases, the NLS comprises the amino acid sequence KRPAATKKAGQAKKKK (SEQ ID NO: 1547). Other suitable NLS are described elsewhere herein. In some cases, the first fusion partner is a first member of a dimerization pair.

[0323] An NLS can be at or near the N-terminus and/or the C-terminus. In some cases, the first fusion polypeptide comprises two or more NLSs (e.g., 3 or more, 4 or more, or 5 or more NLSs). In some cases, the first fusion polypeptide comprises one or more NLSs (e.g., 2 or more, 3 or more, or 4 or more NLSs) at or near the N-terminus and/or one or more NLSs (e.g., 2 or more, 3 or more, or 4 or more NLSs) at or near the C-terminus. The term “at or near” is used here because, as is known in the art, the NLS need not be at the actual terminus of a protein, but can be positioned near (e.g., within 100 amino acids of) an N- and/or C-terminus (e.g., within 80, within 75, within 60, within 55, within 50, within 45, within 40, within 35, or within 30 amino acids of the an N- and/or C-terminus).

[0324] In some cases, a first fusion polypeptide comprises one or more linker polypeptides. For example, a linker polypeptide can be interposed between any of: a) an NLS and a fusion partner; b) a fusion partner and an HNH polypeptide; c) a PAM-interacting polypeptide and a RuvCI polypeptide; and d) a RuvCII polypeptide and a fusion partner. Suitable linker polypeptides are as described above.

[0325] A RuvCIII polypeptide can comprise an amino acid sequence having at least 75%, at least 80%, at least 85%, at least 90%, at least 95%, at least 98%, at least 99%, or 100%, amino acid sequence identity to a contiguous stretch of from 150 amino acids to 190 amino acids of amino acids 910 to 1099 of the S. pyogenes Cas9 amino acid sequence set forth in SEQ ID NO: 1545, or a corresponding segment of a Cas9 polypeptide amino acid sequence set forth in any of SEQ ID NOs: 1-259 and 795-1346; and can have a length of from 150 amino acids to 160 amino acids, from 160 amino acids to 170 amino acids, from 170 amino acids to 180 amino acids, from 180 amino acids to 190 amino acids, from 190 amino acids to 200 amino acids, from 200 amino acids to 210 amino acids, or from 210 amino acids to 220 amino acids. In some cases, a RuvCIII polypeptide comprises an amino acid sequence having at least 75%, at least 80%, at least 85%, at least 90%, at least 95%, at least 98%, at least 99%, or 100%, amino acid sequence identity to amino acids 910 to 1099 of the S. pyogenes Cas9 amino acid sequence set forth in SEQ ID NO: 1545, or a corresponding segment of a Cas9 polypeptide amino acid sequence set forth in any of SEQ ID NOs: 1-259 and 795-1346; and has a length of from 180 amino acids to 190 amino acids (e.g., 180, 181, 182, 183, 184, 185, 186, 187, 188, 189, or 190 amino acids).

[0326] A PAM-interacting polypeptide can comprise an amino acid sequence having at least 75%, at least 80%, at least 85%, at least 90%, at least 95%, at least 98%, at least 99%, or 100%, amino acid sequence identity to a contiguous stretch of from 200 amino acids to 268 amino acids of amino acids 1100 to 1367 of the S. pyogenes Cas9 amino acid sequence set forth in SEQ ID NO: 1545, or a corresponding segment of a Cas9 polypeptide amino acid sequence set forth in any of SEQ ID NOs: 1-259 and 795-1346; and can have a length of from 240 amino acids to 280 amino acids, e.g., from 240 amino acids to 250 amino acids, from 250 amino acids to 260 amino acids, from 260 amino acids to 270 amino acids, or from 270 amino acids to 280 amino acids. In some cases, a PAM-interacting polypeptide comprises an amino acid sequence having at least 75%, at least 80%, at least 85%, at least 90%, at least 95%, at least 98%, at least 99%, or 100%, amino acid sequence identity to amino acids 1100 to 1367 of the S. pyogenes Cas9 amino acid sequence set forth in SEQ ID NO: 1545, or a corresponding segment of a Cas9 polypeptide amino acid sequence set forth in any of SEQ ID NOs: 1-259 and 795-1346; and has a length of from 260 amino acids to 270 amino acids (e.g., 260, 261, 262, 263, 264, 265, 266, 267, 268, 269, or 270 amino acids).

[0327] A RuvCI polypeptide can comprise an amino acid sequence having at least 75%, at least 80%, at least 85%, at least 90%, at least 95%, at least 98%, at least 99%, or 100%, amino acid sequence identity to a contiguous stretch of from 40 amino acids to 60 amino acids of amino acids 1-60 of the S. pyogenes Cas9 amino acid sequence set forth in SEQ ID NO: 1545, or a corresponding segment of a Cas9 polypeptide amino acid sequence set forth in any of SEQ ID NOs: 1-259 and 795-1346; and can have a length of from 40 amino acids to 80 amino acids, e.g., from 40 amino acids to 50 amino acids, from 50 amino acids to 60 amino acids, from 60 amino acids to 70 amino acids, or from 70 amino acids to 80 amino acids. In some cases, a RuvCI polypeptide comprises an amino acid sequence having at least 75%, at least 80%, at least 85%, at least 90%, at least 95%, at least 98%, at least 99%, or 100%, amino acid sequence identity to amino acids 1-60 of the S. pyogenes Cas9 amino acid sequence set forth in SEQ ID NO: 1545, or a corresponding segment of a Cas9 polypeptide amino acid sequence set forth in any of SEQ ID NOs: 1-259 and 795-1346; and has a length of from 50 amino acids to 60 amino acids (e.g., 50, 51, 52, 53, 54, 55, 56, 57, 58, 59, or 60 amino acids).

[0328] A RuvCII polypeptide can comprise an amino acid sequence having at least 75%, at least 80%, at least 85%, at least 90%, at least 95%, at least 98%, at least 99%, or 100%, amino acid sequence identity to a contiguous stretch of from 40 to 46 amino acids of amino acids 729-775 of the S. pyogenes Cas9 amino acid sequence set forth in SEQ ID NO: 1545, or a corresponding segment of a Cas9 polypeptide amino acid sequence set forth in any of SEQ ID NOs: 1-259 and 795-1346; and can have a length of from 40 amino acids to about 60 amino acids, e.g., from 40 amino acids to 45 amino acids, from 45 amino acids to 50 amino acids, from 50 amino acids to 55 amino acids, or from 55 amino acids to 60 amino acids. In some cases, a RuvCII polypeptide comprises an amino acid sequence having at least 75%, at least 80%, at least 85%, at least 90%, at least 95%, at least 98%, at least 99%, or 100%, amino acid sequence identity to amino acids 728-774 of the S. pyogenes Cas9 amino acid sequence set forth in SEQ ID NO: 1545, or a corresponding segment of a Cas9 polypeptide amino acid sequence set forth in any of SEQ ID NOs: 1-259 and 795-1346; and has a length of 45-50 (e.g., 45, 46, 47, 48, 49, or 50) amino acids.

[0329] An HNH polypeptide can comprise an amino acid sequence having at least 75%, at least 80%, at least 85%, at least 90%, at least 95%, at least 98%, at least 99%, or 100%, amino acid sequence identity to a contiguous stretch of from 100 to 134 amino acids of amino acids 776-909 of the S. pyogenes Cas9 amino acid sequence set forth in SEQ ID NO: 1545, or a corresponding segment of a Cas9 polypeptide amino acid sequence set forth in any of SEQ ID NOs: 1-259 and 795-1346; and can have a length of from 90 amino acids to 150 amino acids, e.g., from 90 amino acids to 95 amino acids, from 95 to amino acids to 100 amino acids, from 100 amino acids to 125 amino acids, from 125 amino acids to 130 amino acids, from 130 amino acids to 135 amino acids, from 135 amino acids to 140 amino acids, from 140 amino acids to 145 amino acids, or from 145 amino acids to 150 amino acids. In some cases, an HNH polypeptide comprises an amino acid sequence having at least 75%, at least 80%, at least 85%, at least 90%, at least 95%, at least 98%, at least 99%, or 100%, amino acid sequence identity to amino acids 776-909 of the S. pyogenes Cas9 amino acid sequence set forth in SEQ ID NO: 1545, or a corresponding segment of a Cas9 polypeptide amino acid sequence set forth in any of SEQ ID NOs: 1-259 and 795-1346; and has a length of from 130 amino acids to 140 amino acids (e.g., 130, 131, 132, 133, 134, 135, 136, 137, 138, 139, or 140 amino acids).

[0330] Cas9 Nuclease Lobe Circular Permutant 4

[0331] In some cases, the first fusion polypeptide comprises, in order from N-terminus to C-terminus: a) a first fusion partner; and b) a first polypeptide comprising: i) a RuvCIII polypeptide; ii) a PAM-interacting polypeptide; iii) a RuvCI polypeptide; iv) a RuvCII polypeptide; and v) an HNH polypeptide. In some cases, the first fusion polypeptide comprises, in order from N-terminus to C-terminus: a) a first polypeptide comprising: i) a RuvCIII polypeptide; ii) a PAM-interacting polypeptide; iii) a RuvCI polypeptide; iv) a RuvCII polypeptide; and v) an HNH polypeptide; and b) a first fusion partner. In some cases, the first fusion partner is a first member of a dimerization pair. Suitable first members of a dimerization pair are described herein.

[0332] In some cases, the first fusion polypeptide comprises a heterologous sequence that provides for subcellular localization (e.g., a nuclear localization signal (NLS) for targeting to the nucleus; a mitochondrial localization signal for targeting to the mitochondria; a chloroplast localization signal for targeting to a chloroplast; an ER retention signal; and the like). In some cases, the first fusion polypeptide includes 2 or more, 3 or more, 4 or more, or 5 or more NLSs. In some cases, an NLS is located at or near (e.g., within 75 amino acids, 50 amino acids, or 30 amino acids) the N-terminus and/or at or near (e.g., within 75 amino acids, 50 amino acids, or 30 amino acids) the C-terminus. In some cases, the first fusion polypeptide comprises a nuclear localization signal (NLS).

[0333] In some cases, the first fusion polypeptide comprises, in order from N-terminus to C-terminus: a) an NLS; b) a first fusion partner; and c) a first polypeptide comprising: i) a RuvCIII polypeptide; ii) a PAM-interacting polypeptide; iii) a RuvCI polypeptide; iv) a RuvCII polypeptide; and v) an HNH polypeptide. In some cases, the first fusion polypeptide comprises, in order from N-terminus to C-terminus: a) a first polypeptide comprising: i) a RuvCIII polypeptide; ii) a PAM-interacting polypeptide; iii) a RuvCI polypeptide; iv) a RuvCII polypeptide; and v) an HNH polypeptide; b) a first fusion partner; and c) a fusion partner. In some cases, the first fusion polypeptide comprises, in order from N-terminus to C-terminus: a) an NLS; b) a first fusion partner; c) a first polypeptide comprising: i) a RuvCIII polypeptide; ii) a PAM-interacting polypeptide; iii) a RuvCI polypeptide; iv) a RuvCII polypeptide; and v) an HNH polypeptide; d) an NLS. In some cases, the first fusion partner is a first member of a dimerization pair. In some cases, the NLS comprises the amino acid sequence MAPKKKRKVGIHGVPAA (SEQ ID NO: 1546). In some cases, the NLS comprises the amino acid sequence KRPAATKKAGQAKKKK (SEQ ID NO: 1547). Other suitable NLS are described elsewhere herein. In some cases, the first fusion partner is a first member of a dimerization pair.

[0334] An NLS can be at or near the N-terminus and/or the C-terminus. In some cases, the first fusion polypeptide comprises two or more NLSs (e.g., 3 or more, 4 or more, or 5 or more NLSs). In some cases, the first fusion polypeptide comprises one or more NLSs (e.g., 2 or more, 3 or more, or 4 or more NLSs) at or near the N-terminus and/or one or more NLSs (e.g., 2 or more, 3 or more, or 4 or more NLSs) at or near the C-terminus. The term “at or near” is used here because, as is known in the art, the NLS need not be at the actual terminus of a protein, but can be positioned near (e.g., within 100 amino acids of) an N- and/or C-terminus (e.g., within 80, within 75, within 60, within 55, within 50, within 45, within 40, within 35, or within 30 amino acids of the an N- and/or C-terminus).

[0335] In some cases, a first fusion polypeptide comprises one or more linker polypeptides. For example, a linker polypeptide can be interposed between any of: a) an NLS and a fusion partner; b) a fusion partner and a RuvCIII polypeptide; c) a PAM-interacting polypeptide and a RuvCI polypeptide; and d) an HNH polypeptide and a fusion partner. Suitable linker polypeptides are as described above.

[0336] A RuvCIII polypeptide can comprise an amino acid sequence having at least 75%, at least 80%, at least 85%, at least 90%, at least 95%, at least 98%, at least 99%, or 100%, amino acid sequence identity to a contiguous stretch of from 150 amino acids to 190 amino acids of amino acids 910 to 1099 of the S. pyogenes Cas9 amino acid sequence set forth in SEQ ID NO: 1545, or a corresponding segment of a Cas9 polypeptide amino acid sequence set forth in any of SEQ ID NOs: 1-259 and 795-1346; and can have a length of from 150 amino acids to 160 amino acids, from 160 amino acids to 170 amino acids, from 170 amino acids to 180 amino acids, from 180 amino acids to 190 amino acids, from 190 amino acids to 200 amino acids, from 200 amino acids to 210 amino acids, or from 210 amino acids to 220 amino acids. In some cases, a RuvCIII polypeptide comprises an amino acid sequence having at least 75%, at least 80%, at least 85%, at least 90%, at least 95%, at least 98%, at least 99%, or 100%, amino acid sequence identity to amino acids 910 to 1099 of the S. pyogenes Cas9 amino acid sequence set forth in SEQ ID NO: 1545, or a corresponding segment of a Cas9 polypeptide amino acid sequence set forth in any of SEQ ID NOs: 1-259 and 795-1346; and has a length of from 180 amino acids to 190 amino acids (e.g., 180, 181, 182, 183, 184, 185, 186, 187, 188, 189, or 190 amino acids).

[0337] A PAM-interacting polypeptide can comprise an amino acid sequence having at least 75%, at least 80%, at least 85%, at least 90%, at least 95%, at least 98%, at least 99%, or 100%, amino acid sequence identity to a contiguous stretch of from 200 amino acids to 268 amino acids of amino acids 1100 to 1367 of the S. pyogenes Cas9 amino acid sequence set forth in SEQ ID NO: 1545, or a corresponding segment of a Cas9 polypeptide amino acid sequence set forth in any of SEQ ID NOs: 1-259 and 795-1346; and can have a length of from 240 amino acids to 280 amino acids, e.g., from 240 amino acids to 250 amino acids, from 250 amino acids to 260 amino acids, from 260 amino acids to 270 amino acids, or from 270 amino acids to 280 amino acids. In some cases, a PAM-interacting polypeptide comprises an amino acid sequence having at least 75%, at least 80%, at least 85%, at least 90%, at least 95%, at least 98%, at least 99%, or 100%, amino acid sequence identity to amino acids 1100 to 1367 of the S. pyogenes Cas9 amino acid sequence set forth in SEQ ID NO: 1545, or a corresponding segment of a Cas9 polypeptide amino acid sequence set forth in any of SEQ ID NOs: 1-259 and 795-1346; and has a length of from 260 amino acids to 270 amino acids (e.g., 260, 261, 262, 263, 264, 265, 266, 267, 268, 269, or 270 amino acids).

[0338] A RuvCI polypeptide can comprise an amino acid sequence having at least 75%, at least 80%, at least 85%, at least 90%, at least 95%, at least 98%, at least 99%, or 100%, amino acid sequence identity to a contiguous stretch of from 40 amino acids to 60 amino acids of amino acids 1-60 of the S. pyogenes Cas9 amino acid sequence set forth in SEQ ID NO: 1545, or a corresponding segment of a Cas9 polypeptide amino acid sequence set forth in any of SEQ ID NOs: 1-259 and 795-1346; and can have a length of from 40 amino acids to 80 amino acids, e.g., from 40 amino acids to 50 amino acids, from 50 amino acids to 60 amino acids, from 60 amino acids to 70 amino acids, or from 70 amino acids to 80 amino acids. In some cases, a RuvCI polypeptide comprises an amino acid sequence having at least 75%, at least 80%, at least 85%, at least 90%, at least 95%, at least 98%, at least 99%, or 100%, amino acid sequence identity to amino acids 1-60 of the S. pyogenes Cas9 amino acid sequence set forth in SEQ ID NO: 1545, or a corresponding segment of a Cas9 polypeptide amino acid sequence set forth in any of SEQ ID NOs: 1-259 and 795-1346; and has a length of from 50 amino acids to 60 amino acids (e.g., 50, 51, 52, 53, 54, 55, 56, 57, 58, 59, or 60 amino acids).

[0339] A RuvCII polypeptide can comprise an amino acid sequence having at least 75%, at least 80%, at least 85%, at least 90%, at least 95%, at least 98%, at least 99%, or 100%, amino acid sequence identity to a contiguous stretch of from 40 to 46 amino acids of amino acids 729-775 of the S. pyogenes Cas9 amino acid sequence set forth in SEQ ID NO: 1545, or a corresponding segment of a Cas9 polypeptide amino acid sequence set forth in any of SEQ ID NOs: 1-259 and 795-1346; and can have a length of from 40 amino acids to about 60 amino acids, e.g., from 40 amino acids to 45 amino acids, from 45 amino acids to 50 amino acids, from 50 amino acids to 55 amino acids, or from 55 amino acids to 60 amino acids. In some cases, a RuvCII polypeptide comprises an amino acid sequence having at least 75%, at least 80%, at least 85%, at least 90%, at least 95%, at least 98%, at least 99%, or 100%, amino acid sequence identity to amino acids 728-774 of the S. pyogenes Cas9 amino acid sequence set forth in SEQ ID NO: 1545, or a corresponding segment of a Cas9 polypeptide amino acid sequence set forth in any of SEQ ID NOs: 1-259 and 795-1346; and has a length of 45-50 (e.g., 45, 46, 47, 48, 49, or 50) amino acids.

[0340] An HNH polypeptide can comprise an amino acid sequence having at least 75%, at least 80%, at least 85%, at least 90%, at least 95%, at least 98%, at least 99%, or 100%, amino acid sequence identity to a contiguous stretch of from 100 to 134 amino acids of amino acids 776-909 of the S. pyogenes Cas9 amino acid sequence set forth in SEQ ID NO: 1545, or a corresponding segment of a Cas9 polypeptide amino acid sequence set forth in any of SEQ ID NOs: 1-259 and 795-1346; and can have a length of from 90 amino acids to 150 amino acids, e.g., from 90 amino acids to 95 amino acids, from 95 to amino acids to 100 amino acids, from 100 amino acids to 125 amino acids, from 125 amino acids to 130 amino acids, from 130 amino acids to 135 amino acids, from 135 amino acids to 140 amino acids, from 140 amino acids to 145 amino acids, or from 145 amino acids to 150 amino acids. In some cases, an HNH polypeptide comprises an amino acid sequence having at least 75%, at least 80%, at least 85%, at least 90%, at least 95%, at least 98%, at least 99%, or 100%, amino acid sequence identity to amino acids 776-909 of the S. pyogenes Cas9 amino acid sequence set forth in SEQ ID NO: 1545, or a corresponding segment of a Cas9 polypeptide amino acid sequence set forth in any of SEQ ID NOs: 1-259 and 795-1346; and has a length of from 130 amino acids to 140 amino acids (e.g., 130, 131, 132, 133, 134, 135, 136, 137, 138, 139, or 140 amino acids).

[0341] Cas9 Nuclease Lobe Circular Permutant 5

[0342] In some cases, the first fusion polypeptide comprises, in order from N-terminus to C-terminus: a) a first fusion partner; and b) a first polypeptide comprising: i) a C-terminal portion of a RuvCIII polypeptide; ii) a PAM-interacting polypeptide; iii) a RuvCI polypeptide; iv) a RuvCII polypeptide; v) an HNH polypeptide; and vi) an N-terminal portion of a RuvCIII polypeptide. In some cases, the first fusion polypeptide comprises, in order from N-terminus to C-terminus: a) a first polypeptide comprising: i) a C-terminal portion of a RuvCIII polypeptide; ii) a PAM-interacting polypeptide; iii) a RuvCI polypeptide; iv) a RuvCII polypeptide; v) an HNH polypeptide; and vi) an N-terminal portion of a RuvCIII polypeptide; and b) a first fusion partner. In some cases, the first fusion partner is a first member of a dimerization pair. Suitable first members of a dimerization pair are described elsewhere herein.

[0343] A C-terminal portion of a RuvCIII polypeptide can comprise an amino acid sequence having at least 75%, at least 80%, at least 85%, at least 90%, at least 95%, at least 98%, at least 99%, or 100%, amino acid sequence identity to a contiguous stretch of from 75 amino acids to 84 amino acids of amino acids 1016 to 1099 of the S. pyogenes Cas9 amino acid sequence set forth in SEQ ID NO: 1545, or a corresponding segment of a Cas9 polypeptide amino acid sequence set forth in any of SEQ ID NOs: 1-259 and 795-1346; and can have a length of from 70 amino acids to 100 amino acids, from 70 amino acids to 80 amino acids, from 80 amino acids to 90 amino acids, or from 90 amino acids to 100 amino acids. In some cases, a C-terminal RuvCIII polypeptide comprises an amino acid sequence having at least 75%, at least 80%, at least 85%, at least 90%, at least 95%, at least 98%, at least 99%, or 100%, amino acid sequence identity to amino acids 1016 to 1099 of the S. pyogenes Cas9 amino acid sequence set forth in SEQ ID NO: 1545, or a corresponding segment of a Cas9 polypeptide amino acid sequence set forth in any of SEQ ID NOs: 1-259 and 795-1346; and has a length of from 80 amino acids to 90 amino acids (e.g., 80, 81, 82, 83, 84, 85, 86, 87, 88, 89, or 90 amino acids).

[0344] An N-terminal portion of a RuvCIII polypeptide can comprise an amino acid sequence having at least 75%, at least 80%, at least 85%, at least 90%, at least 95%, at least 98%, at least 99%, or 100%, amino acid sequence identity to a contiguous stretch of from 80 amino acids to 106 amino acids of amino acids 910 to 1015 of the S. pyogenes Cas9 amino acid sequence set forth in SEQ ID NO: 1545, or a corresponding segment of a Cas9 polypeptide amino acid sequence set forth in any of SEQ ID NOs: 1-259 and 795-1346; and can have a length of from 80 amino acids to 120 amino acids, from 80 amino acids to 90 amino acids, from 90 amino acids to 100 amino acids, from 100 amino acids to 110 amino acids, or from 110 amino acids to 120 amino acids. In some cases, a RuvCIII polypeptide comprises an amino acid sequence having at least 75%, at least 80%, at least 85%, at least 90%, at least 95%, at least 98%, at least 99%, or 100%, amino acid sequence identity to amino acids 910 to 1015 of the S. pyogenes Cas9 amino acid sequence set forth in SEQ ID NO: 1545, or a corresponding segment of a Cas9 polypeptide amino acid sequence set forth in any of SEQ ID NOs: 1-259 and 795-1346; and has a length of from 100 amino acids to 106 amino acids (e.g., 100, 101, 102, 103, 104, 105, 106, 107, 108, 109, or 110 amino acids).

[0345] A PAM-interacting polypeptide can comprise an amino acid sequence having at least 75%, at least 80%, at least 85%, at least 90%, at least 95%, at least 98%, at least 99%, or 100%, amino acid sequence identity to a contiguous stretch of from 200 amino acids to 268 amino acids of amino acids 1100 to 1367 of the S. pyogenes Cas9 amino acid sequence set forth in SEQ ID NO: 1545, or a corresponding segment of a Cas9 polypeptide amino acid sequence set forth in any of SEQ ID NOs: 1-259 and 795-1346; and can have a length of from 240 amino acids to 280 amino acids, e.g., from 240 amino acids to 250 amino acids, from 250 amino acids to 260 amino acids, from 260 amino acids to 270 amino acids, or from 270 amino acids to 280 amino acids. In some cases, a PAM-interacting polypeptide comprises an amino acid sequence having at least 75%, at least 80%, at least 85%, at least 90%, at least 95%, at least 98%, at least 99%, or 100%, amino acid sequence identity to amino acids 1100 to 1367 of the S. pyogenes Cas9 amino acid sequence set forth in SEQ ID NO: 1545, or a corresponding segment of a Cas9 polypeptide amino acid sequence set forth in any of SEQ ID NOs: 1-259 and 795-1346; and has a length of from 260 amino acids to 270 amino acids (e.g., 260, 261, 262, 263, 264, 265, 266, 267, 268, 269, or 270 amino acids).

[0346] A RuvCI polypeptide can comprise an amino acid sequence having at least 75%, at least 80%, at least 85%, at least 90%, at least 95%, at least 98%, at least 99%, or 100%, amino acid sequence identity to a contiguous stretch of from 40 amino acids to 60 amino acids of amino acids 1-60 of the S. pyogenes Cas9 amino acid sequence set forth in SEQ ID NO: 1545, or a corresponding segment of a Cas9 polypeptide amino acid sequence set forth in any of SEQ ID NOs: 1-259 and 795-1346; and can have a length of from 40 amino acids to 80 amino acids, e.g., from 40 amino acids to 50 amino acids, from 50 amino acids to 60 amino acids, from 60 amino acids to 70 amino acids, or from 70 amino acids to 80 amino acids. In some cases, a RuvCI polypeptide comprises an amino acid sequence having at least 75%, at least 80%, at least 85%, at least 90%, at least 95%, at least 98%, at least 99%, or 100%, amino acid sequence identity to amino acids 1-60 of the S. pyogenes Cas9 amino acid sequence set forth in SEQ ID NO: 1545, or a corresponding segment of a Cas9 polypeptide amino acid sequence set forth in any of SEQ ID NOs: 1-259 and 795-1346; and has a length of from 50 amino acids to 60 amino acids (e.g., 50, 51, 52, 53, 54, 55, 56, 57, 58, 59, or 60 amino acids).

[0347] A RuvCII polypeptide can comprise an amino acid sequence having at least 75%, at least 80%, at least 85%, at least 90%, at least 95%, at least 98%, at least 99%, or 100%, amino acid sequence identity to a contiguous stretch of from 40 to 46 amino acids of amino acids 729-775 of the S. pyogenes Cas9 amino acid sequence set forth in SEQ ID NO: 1545, or a corresponding segment of a Cas9 polypeptide amino acid sequence set forth in any of SEQ ID NOs: 1-259 and 795-1346; and can have a length of from 40 amino acids to about 60 amino acids, e.g., from 40 amino acids to 45 amino acids, from 45 amino acids to 50 amino acids, from 50 amino acids to 55 amino acids, or from 55 amino acids to 60 amino acids. In some cases, a RuvCII polypeptide comprises an amino acid sequence having at least 75%, at least 80%, at least 85%, at least 90%, at least 95%, at least 98%, at least 99%, or 100%, amino acid sequence identity to amino acids 728-774 of the S. pyogenes Cas9 amino acid sequence set forth in SEQ ID NO: 1545, or a corresponding segment of a Cas9 polypeptide amino acid sequence set forth in any of SEQ ID NOs: 1-259 and 795-1346; and has a length of 45-50 (e.g., 45, 46, 47, 48, 49, or 50) amino acids.

[0348] An HNH polypeptide can comprise an amino acid sequence having at least 75%, at least 80%, at least 85%, at least 90%, at least 95%, at least 98%, at least 99%, or 100%, amino acid sequence identity to a contiguous stretch of from 100 to 134 amino acids of amino acids 776-909 of the S. pyogenes Cas9 amino acid sequence set forth in SEQ ID NO: 1545, or a corresponding segment of a Cas9 polypeptide amino acid sequence set forth in any of SEQ ID NOs: 1-259 and 795-1346; and can have a length of from 90 amino acids to 150 amino acids, e.g., from 90 amino acids to 95 amino acids, from 95 to amino acids to 100 amino acids, from 100 amino acids to 125 amino acids, from 125 amino acids to 130 amino acids, from 130 amino acids to 135 amino acids, from 135 amino acids to 140 amino acids, from 140 amino acids to 145 amino acids, or from 145 amino acids to 150 amino acids. In some cases, an HNH polypeptide comprises an amino acid sequence having at least 75%, at least 80%, at least 85%, at least 90%, at least 95%, at least 98%, at least 99%, or 100%, amino acid sequence identity to amino acids 776-909 of the S. pyogenes Cas9 amino acid sequence set forth in SEQ ID NO: 1545, or a corresponding segment of a Cas9 polypeptide amino acid sequence set forth in any of SEQ ID NOs: 1-259 and 795-1346; and has a length of from 130 amino acids to 140 amino acids (e.g., 130, 131, 132, 133, 134, 135, 136, 137, 138, 139, or 140 amino acids).

[0349] Examples of First Fusion Polypeptides

[0350] In some embodiments, a first fusion polypeptide comprises an amino acid sequence having at least 75%, at least 80%, at least 85%, at least 90%, at least 95%, at least 98%, at least 99%, or 100%, amino acid sequence identity to amino acids 82-829 of the amino acid sequence depicted in the following paragraph. In some cases, the fusion partner is linked, directly or via a linker, to the N-terminus of the polypeptide. For example, in some cases, a first fusion polypeptide comprises, in order from N-terminus to C-terminus: a) a fusion partner; and b) a polypeptide comprising an amino acid sequence having at least 75%, at least 80%, at least 85%, at least 90%, at least 95%, at least 98%, at least 99%, or 100%, amino acid sequence identity to amino acids 82-829 of the amino acid sequence amino acid sequence depicted in the following paragraph. Suitable fusion partners include a first member of a dimerization pair, where suitable first members of a dimerization pair are described elsewhere herein. In some cases, a first fusion polypeptide comprises, in order from N-terminus to C-terminus: a) an NLS; b) a fusion partner; and c) a polypeptide comprising an amino acid sequence having at least 75%, at least 80%, at least 85%, at least 90%, at least 95%, at least 98%, at least 99%, or 100%, amino acid sequence identity to amino acids 82-829 of the amino acid sequence depicted in the following paragraph. In some cases, a first fusion polypeptide comprises, in order from N-terminus to C-terminus: a) an NLS; b) a fusion partner; c) a polypeptide comprising an amino acid sequence having at least 75%, at least 80%, at least 85%, at least 90%, at least 95%, at least 98%, at least 99%, or 100%, amino acid sequence identity to amino acids 82-829 of the amino acid sequence depicted in the following paragraph; and d) a fusion partner.

(SEQ ID NO: 1621)

MDYKDHDGDYKDHDIDYKDDDDKMAPKKKRKVGIHGVPAASIAATLENDL
ARLENENARLEKDIANLERDLAKLEREEAYFGGSGGSGGSASGQGDSLHE
HIANLAGSPAIKKGILQTVKVVDELVKVMGRHKPENIVIEMARENQTTQK
GQKNSRERMKRIEEGIKELGSQILKEHPVENTQLQNEKLYLYYLQNGRDM
YVDQELDINRLSDYDVDHIVPQSFLKDDSIDNKVLTRSDKNRGKSDNVPS
EEVVKKMKNYWRQLLNAKLITQRKFDNLTKAERGGLSELDKAGFIKRQLV
ETRQITKHVAQILDSRMNTKYDENDKLIREVKVITLKSKLVSDFRKDFQF
YKVREINNYHHAHDAYLNAVVGTALIKKYPKLESEFVYGDYKVYDVRKMI
AKSEQEIGKATAKYFFYSNIMNFFKTEITLANGEIRKRPLIETNGETGEI
VWDKGRDFATVRKVLSMPQVNIVKKTEVQTGGFSKESILPKRNSDKLIAR
KKDWDPKKYGGFDSPTVAYSVLVVAKVEKGKSKKLKSVKELLGITIMERS
SFEKNPIDFLEAKGYKEVKKDLIIKLPKYSLFELENGRKRMLASAGELQK
GNELALPSKYVNFLYLASHYEKLKGSPEDNEQKQLFVEQHKHYLDEIIEQ
ISEFSKRVILADANLDKVLSAYNKHRDKPIREQAENIIHLFTLTNLGAPA
AFKYFDTTIDRKRYTSTKEVLDATLIHQSITGLYETRIDLSQLGGDGSGG
SGGSGGSGGSGGSGGSGGSGGVDDKKYSIGLDIGTNSVGWAVITDEYKVP
SKKFKVLGNTDRHSIKKNLIGALLFDSGEKRPAATKKAGQAKKKK

[0351] In some embodiments, a first fusion polypeptide comprises an amino acid sequence having at least 75%, at least 80%, at least 85%, at least 90%, at least 95%, at least 98%, at least 99%, or 100%, amino acid sequence identity to amino acids 82-820 of the amino acid sequence depicted in the following paragraph. In some cases, the fusion partner is linked, directly or via a linker, to the N-terminus of the polypeptide. For example, in some cases, a first fusion polypeptide comprises, in order from N-terminus to C-terminus: a) a fusion partner; and b) a polypeptide comprising an amino acid sequence having at least 75%, at least 80%, at least 85%, at least 90%, at least 95%, at least 98%, at least 99%, or 100%, amino acid sequence identity to amino acids 82-820 of the amino acid sequence depicted in the following paragraph. Suitable fusion partners include a first member of a dimerization pair, where suitable first members of a dimerization pair are described elsewhere herein. In some cases, a first fusion polypeptide comprises, in order from N-terminus to C-terminus: a) an NLS; b) a fusion partner; and c) a polypeptide comprising an amino acid sequence having at least 75%, at least 80%, at least 85%, at least 90%, at least 95%, at least 98%, at least 99%, or 100%, amino acid sequence identity to amino acids 82-820 of the amino acid sequence depicted in the following paragraph. In some cases, a first fusion polypeptide comprises, in order from N-terminus to C-terminus: a) an NLS; b) a fusion partner; c) a polypeptide comprising an amino acid sequence having at least 75%, at least 80%, at least 85%, at least 90%, at least 95%, at least 98%, at least 99%, or 100%, amino acid sequence identity to amino acids 82-820 of the amino acid sequence depicted in the following paragraph; and d) a fusion partner.

(SEQ ID NO: 1622)

MDYKDHDGDYKDHDIDYKDDDDKMAPKKKRKVGIHGVPAASIAATLENDL
ARLENENARLEKDIANLERDLAKLEREEAYFGGSGGSGGSASGQGDNVPS
EEVVKKMKNYWRQLLNAKLITQRKFDNLTKAERGGLSELDKAGFIKRQLV
ETRQITKHVAQILDSRMNTKYDENDKLIREVKVITLKSKLVSDFRKDFQF
YKVREINNYHHAHDAYLNAVVGTALIKKYPKLESEFVYGDYKVYDVRKMI
AKSEQEIGKATAKYFFYSNIMNFFKTEITLANGEIRKRPLIETNGETGEI
VWDKGRDFATVRKVLSMPQVNIVKKTEVQTGGFSKESILPKRNSDKLIAR
KKDWDPKKYGGFDSPTVAYSVLVVAKVEKGKSKKLKSVKELLGITIMERS
SFEKNPIDFLEAKGYKEVKKDLIIKLPKYSLFELENGRKRMLASAGELQK
GNELALPSKYVNFLYLASHYEKLKGSPEDNEQKQLFVEQHKHYLDEIIEQ
ISEFSKRVILADANLDKVLSAYNKHRDKPIREQAENIIHLFTLTNLGAPA
AFKYFDTTIDRKRYTSTKEVLDATLIHQSITGLYETRIDLSQLGGDGSGG
SGGSGGSGGSGGSGGSGGSGGVDDKKYSIGLDIGTNSVGWAVITDEYKVP
SKKFKVLGNTDRHSIKKNLIGALLFDSGGSSGSPAIKKGILQTVKVVDEL
VKVMGRHKPENIVIEMARENQTTQKGQKNSRERMKRIEEGIKELGSQILK
EHPVENTQLQNEKLYLYYLQNGRDMYVDQELDINRLSDYDVDHIVPQSFL
KDDSIDNKVLTRSDKNRGKSEKRPAATKKAGQAKKKK.

[0352] Second Fusion Polypeptide

[0353] As described above, a Cas9 heterodimer comprises: A) a first fusion polypeptide comprising: a) a first, circular permuted, polypeptide that comprises: i) a RuvCI polypeptide; ii) a RuvCII polypeptide; iii) an HNH polypeptide; iv) a RuvCIII polypeptide; and v) a PAM-interacting polypeptide; and b) a first fusion partner, where the first fusion partner is a first member of a dimerization pair; and B) a second fusion polypeptide comprising: a) a second polypeptide that comprises an alpha-helical recognition region (e.g., an alpha helical lobe); and b) a second fusion partner, where the second fusion partner is a second member of the dimerization pair. In some cases, the fusion partner is at or near (e.g., within the first 50 amino acids of the N-terminus) the N-terminus of the second polypeptide. In some cases, the fusion partner is at or near (e.g., within the first 50 amino acids of the C-terminus) the C-terminus of the second polypeptide. In some cases, the fusion partner is located internally within the second fusion polypeptide.

[0354] In some cases, the second polypeptide comprises an α-helical lobe (also referred to as “an alpha-helical recognition region”) of a Cas9 polypeptide. For example, in some cases, the second polypeptide comprises an amino acid sequence having at least 75%, at least 80%, at least 85%, at least 90%, at least 95%, at least 98%, at least 99%, or 100%, amino acid sequence identity to a contiguous stretch of from 400 amino acids to 658 amino acids of amino acids 61 to 718 of the S. pyogenes Cas9 amino acid sequence set forth in SEQ ID NO: 1545, or a corresponding segment of a Cas9 polypeptide amino acid sequence set forth in any of SEQ ID NOs: 1-259 and 795-1346; and can have a length of from 400 amino acids to 800 amino acids, e.g., from 400 amino acids to 450 amino acids, from 450 amino acids to 500 amino acids, from 500 amino acids to 550 amino acids, from 550 amino acids to 600 amino acids, from 600 amino acids to 650 amino acids, from 650 amino acids to 700 amino acids, from 700 amino acids to 750 amino acids, or from 750 amino acids to 800 amino acids. In some cases, the second polypeptide comprises an amino acid sequence having at least 75%, at least 80%, at least 85%, at least 90%, at least 95%, at least 98%, at least 99%, or 100%, amino acid sequence identity to amino acids 61-718 of the S. pyogenes Cas9 amino acid sequence set forth in SEQ ID NO: 1545, or a corresponding segment of a Cas9 polypeptide amino acid sequence set forth in any of SEQ ID NOs: 1-259 and 795-1346; and has a length of from 650 amino acids to 660 amino acids (e.g., 650, 651, 652, 653, 654, 655, 656, 657, 658, 659, or 660 amino acids).

[0355] In some cases, the second polypeptide comprises an amino acid sequence having at least 75%, at least 80%, at least 85%, at least 90%, at least 95%, at least 98%, at least 99%, or 100%, amino acid sequence identity to a contiguous stretch of from 400 amino acids to 624 amino acids of amino acids 95 to 718 of the S. pyogenes Cas9 amino acid sequence set forth in SEQ ID NO: 1545, or a corresponding segment of a Cas9 polypeptide amino acid sequence set forth in any of SEQ ID NOs: 1-259 and 795-1346; and has a length of from about 400 amino acids to 800 amino acids, e.g., from 400 amino acids to 450 amino acids, from 450 amino acids to 500 amino acids, from 500 amino acids to 550 amino acids, from 550 amino acids to 600 amino acids, from 600 amino acids to 650 amino acids, from 650 amino acids to 700 amino acids, from 700 amino acids to 750 amino acids, or from 750 amino acids to 800 amino acids. In some cases, the second polypeptide comprises an amino acid sequence having at least 75%, at least 80%, at least 85%, at least 90%, at least 95%, at least 98%, at least 99%, or 100%, amino acid sequence identity to amino acids 95 to 718 of the S. pyogenes Cas9 amino acid sequence set forth in SEQ ID NO: 1545, or a corresponding segment of a Cas9 polypeptide amino acid sequence set forth in any of SEQ ID NOs: 1-259 and 795-1346; and has a length of from 620 amino acids to 630 amino acids (e.g., 620, 621, 622, 623, 624, 625, 626, 627, 628, 629, or 630 amino acids).

[0356] In some cases, the second fusion polypeptide comprises, in order from N-terminus to C-terminus: a) a second fusion partner; and b) a second polypeptide that comprises an alpha-helical recognition region. In some cases, the second fusion polypeptide comprises, in order from N-terminus to C-terminus: a) a second polypeptide that comprises an alpha-helical recognition region; and b) a second fusion partner.

[0357] In some cases, the second fusion polypeptide comprises a heterologous sequence that provides for subcellular localization (e.g., an NLS for targeting to the nucleus; a mitochondrial localization signal for targeting to the mitochondria; a chloroplast localization signal for targeting to a chloroplast; an ER retention signal; and the like). In some cases, the second fusion polypeptide includes 2 or more, 3 or more, 4 or more, or 5 or more NLSs. In some cases, an NLS is located at or near (e.g., within 75 amino acids, 50 amino acids, or 30 amino acids) the N-terminus and/or at or near (e.g., within 75 amino acids, 50 amino acids, or 30 amino acids) the C-terminus. In some cases, the second fusion polypeptide comprises an NLS.

[0358] For example, in some cases, the second fusion polypeptide comprises, in order from N-terminus to C-terminus: a) an NLS; b) a second fusion partner; and c) a second polypeptide that comprises an alpha-helical recognition region. In some cases, the second fusion polypeptide comprises, in order from N-terminus to C-terminus: a) an NLS; b) a second fusion partner; c) a second polypeptide that comprises an alpha-helical recognition region; and d) an NLS. In some cases, the second fusion polypeptide comprises, in order from N-terminus to C-terminus: a) an NLS; b) a second polypeptide that comprises an alpha-helical recognition region; and c) a second fusion partner. In some cases, the second fusion polypeptide comprises, in order from N-terminus to C-terminus: a) an NLS; b) a second polypeptide that comprises an alpha-helical recognition region; c) a second fusion partner; and d) an NLS. In some cases, the NLS comprises the amino acid sequence MAPKKKRKVGIHGVPAA (SEQ ID NO: 1546). In some cases, the NLS comprises the amino acid sequence KRPAATKKAGQAKKKK (SEQ ID NO: 1547). Other suitable NLS are described elsewhere herein.

[0359] An NLS can be at or near the N-terminus and/or the C-terminus. In some cases, the second fusion polypeptide comprises two or more NLSs (e.g., 3 or more, 4 or more, or 5 or more NLSs). In some cases, the second fusion polypeptide comprises one or more NLSs (e.g., 2 or more, 3 or more, or 4 or more NLSs) at or near the N-terminus and/or one or more NLSs (e.g., 2 or more, 3 or more, or 4 or more NLSs) at or near the C-terminus. The term “at or near” is used here because, as is known in the art, the NLS need not be at the actual terminus of a protein, but can be positioned near (e.g., within 100 amino acids of) an N- and/or C-terminus (e.g., within 80, within 75, within 60, within 55, within 50, within 45, within 40, within 35, or within 30 amino acids of the an N- and/or C-terminus).

[0360] In some cases, the second fusion polypeptide comprises one or more linker polypeptides. For example, a linker polypeptide can be interposed between any of: a) an NLS and a fusion partner; b) a fusion partner and an alpha-helical lobe; and c) an alpha-helical lobe and an NLS.

[0361] First and Second Fusion Partners

[0362] The first fusion partner of the first fusion polypeptide, and the second fusion partner of the second fusion polypeptide, of a Cas9 heterodimer together constitute a “dimer pair.” A dimer pair is a pair of polypeptides that can dimerize with one another. Each member (each polypeptide) of the dimer pair can be part of a different polypeptide, and when the members of the binding pair (the dimer pair) are brought into close proximity with one another (e.g., bind to one another), the two different polypeptides (heterologous polypeptides) to which the dimer pair members are fused are brought into proximity with one another and can be said to dimerize (i.e., as a consequence of the members of the dimer pair dimerizing).

[0363] A Cas9 heterodimer comprises two polypeptides that can interact to form a complex (i.e., to form the heterodimeric Cas9 protein). A Cas9 heterodimer is also referred to herein as a “split Cas9” or a “split Cas9 protein.” The fusion partners present in the first fusion polypeptide and the second fusion polypeptide can be induced to dimerize by a dimerizing agent. When the fusion partners present in the first fusion polypeptide and the second fusion polypeptide dimerize, the first fusion polypeptide and the second fusion polypeptide dimerize. In the absence of the dimerizing agent, and in the absence of a guide RNA that includes a stem loop 2 and/or a stem loop 3, the first fusion polypeptide and the second fusion polypeptide do not dimerize. When the first fusion polypeptide and the second fusion polypeptide dimerize, the Cas9 heterodimer, together with a truncated guide RNA (e.g., a guide RNA that does not include stem loop 2 and/or stem loop 3), can bind a target nucleic acid. A Cas9 heterodimer and a truncated guide RNA form a “Cas9 heterodimer system,” described herein.

[0364] As an illustrative example, a Cas9 heterodimer comprises: A) a first fusion polypeptide (comprising a Cas9 nuclease lobe) and a first fusion partner (“a first member of a dimer pair”); and B) a second fusion polypeptide (comprising a Cas9 alpha-helical lobe) and a second fusion partner (“a second member of the dimer pair”). The first and second fusion polypeptides dimerize when the first and second binding members dimerize (when the first and second binding members are brought into close proximity with one another, e.g., via a dimerizer, via binding to one another, etc.). In some cases, the dimer pair is inducible such that the members of the dimer pair do not associate (e.g., come into proximity with one another, bind to one another, etc.) in the absence of induction (e.g., chemical induction, light induction, etc.). In some cases, the dimer pair is not inducible such that the members of the dimer pair bind to one another when both members are present (e.g., synzip polypeptides).

[0365] Any convenient dimer pair can be used. Example dimer pairs suitable for use in a subject heterodimeric Cas9 protein include non-inducible binding pairs. For example, in some cases, each member of the binding pair is a protein domain that binds to the other member. As an illustrative example, in some cases, each member of the binding pair is a coiled-coil domain Examples of suitable coiled-coil domains include, but are not limited to:

SYNZIP14:

(SEQ ID NO: 1556)

NDLDAYEREAEKLEKKNEVLRNRLAALENELATLRQEVASMKQELQS;
SYNZIP17:

(SEQ ID NO: 1557)

NEKEELKSKKAELRNRIEQLKQKREQLKQKIANLRKEIEAYK;
SYNZIP18:

(SEQ ID NO: 1558)

SIAATLENDLARLENENARLEKDIANLERDLAKLEREEAYF.

[0366] In some cases, each of the two members of a non-inducible binding pair comprise an amino acid sequence having 75% or more amino acid sequence identity (e.g., 80% or more, 85% or more, 90% or more, 95% or more, 98% or more, or 100%, amino acid sequence identity) to a coiled coil domain. In some cases, a member of a non-inducible binding pair includes an amino acid sequence having 75% or more amino acid sequence identity (e.g., 80% or more, 85% or more, 90% or more, 95% or more, 98% or more, or 100%, amino acid sequence identity) to SYNZIP14 (the amino acid sequence set forth in SEQ ID NO: 1556). In some cases, a member of a non-inducible binding pair includes an amino acid sequence having 75% or more amino acid sequence identity (e.g., 80% or more, 85% or more, 90% or more, 95% or more, 98% or more, or 100%, amino acid sequence identity) to SYNZIP17 (the amino acid sequence set forth in SEQ ID NO: 1557). In some cases, a member of a non-inducible binding pair includes an amino acid sequence having 75% or more amino acid sequence identity (e.g., 80% or more, 85% or more, 90% or more, 95% or more, 98% or more, or 100%, amino acid sequence identity) to SYNZIP18 (the amino acid sequence set forth in SEQ ID NO: 1558).

[0367] In some cases, one member of a non-inducible binding pair includes an amino acid sequence having 75% or more amino acid sequence identity (e.g., 80% or more, 85% or more, 90% or more, 95% or more, 98% or more, or 100%, amino acid sequence identity) to SYNZIP17 (the amino acid sequence set forth in SEQ ID NO: 1557); and the other member of the non-inducible binding pair includes an amino acid sequence having 75% or more amino acid sequence identity (e.g., 80% or more, 85% or more, 90% or more, 95% or more, 98% or more, or 100%, amino acid sequence identity) to SYNZIP18 (the amino acid sequence set forth in SEQ ID NO: 1558). For example, in some cases, the two members of a non-inducible binding pair are SYNZIP17 and SYNZIP18.

[0368] In some cases, one member of a non-inducible binding pair includes an amino acid sequence having 75% or more amino acid sequence identity (e.g., 80% or more, 85% or more, 90% or more, 95% or more, 98% or more, or 100%, amino acid sequence identity) to SYNZIP14 (the amino acid sequence set forth in SEQ ID NO: 1556); and the other member of the non-inducible binding pair includes an amino acid sequence having 75% or more amino acid sequence identity (e.g., 80% or more, 85% or more, 90% or more, 95% or more, 98% or more, or 100%, amino acid sequence identity) to SYNZIP17 (the amino acid sequence set forth in SEQ ID NO: 1557). For example, in some cases, the two members of a non-inducible binding pair are SYNZIP14 and SYNZIP17.

[0369] Example dimer pairs suitable for use in a subject Cas9 heterodimer also include inducible binding pairs (binding pairs that can be induced to dimerize, e.g., with a dimerizer, as discussed in more detail below). Dimerizer-binding pairs suitable for use in a Cas9 heterodimer are in some embodiments polypeptides (e.g. protein domains) that bind to a different site of the same molecule (referred to herein as a “dimerizer”). In the presence of a dimerizer, both members of a dimerizer-binding pair bind to the dimerizer (e.g., in some cases each binding to a different site of the dimerizer) and are thus brought into proximity with one another. This can also be referred to as chemically-inducible dimerization (CID) (e.g., see DeRose et al, Pflugers Arch. 2013 March; 465(3):409-17, which is hereby incorporated by reference in its entirety). In some embodiments, binding to the dimerizer is reversible. In some embodiments, binding to the dimerizer is irreversible. In some embodiments, binding to the dimerizer is non-covalent. In some embodiments, binding to the dimerizer is covalent.

[0370] Dimer pairs suitable for use include dimerizer-binding pairs that dimerize upon binding of a first member of a dimer pair to a dimerizing agent and of a second member of the dimer pair to the same dimerizing agent. Dimer pairs suitable for use also include dimerizer-binding pairs that dimerize upon binding of a first member of a dimer pair to a dimerizing agent, where the dimerizing agent induces a conformational change in the first member of the dimer pair, and where the conformational change allows the first member of the dimer pair to bind (covalently or non-covalently) to a second member of the dimer pair. Other dimer pairs suitable for use include dimer pairs in which exposure to light (e.g., blue light) induces dimerization of the dimer pair.

[0371] Regardless of the mechanism, an inducible dimer pair will dimerize upon exposure to an agent that induces dimerization, where the agent is in some cases a small molecule, or, for example, in other cases, light. Thus, for simplicity, the discussion below referring to “dimerizer-binding pairs” includes dimer pairs that dimerize regardless of the mechanism.

[0372] Non-limiting examples of suitable dimers (e.g., dimerizer-binding pairs) include, but are not limited to:
[0373] (a) FKBP1A (FK506 binding protein) (e.g., a rapamycin binding portion) paired with FKBP1A (e.g., a rapamycin binding portion): dimerization induced by rapamycin and/or rapamycin analogs known as rapalogs;
[0374] (b) FKBP1A (e.g., a rapamycin binding portion) and 1-RB (Fkbp-Rapamycin Binding Domain): dimerization induced by rapamycin and/or rapamycin analogs known as rapalogs;
[0375] (c) FKBP1A (e.g., a rapamycin binding portion) and CnA (calcineurin catalytic subunit A): dimerization induced by rapamycin and/or rapamycin analogs known as rapalogs;
[0376] (d) FKBP1A (e.g., a rapamycin binding portion) and cyclophilin: dimerization induced by rapamycin and/or rapamycin analogs known as rapalogs;
[0377] (e) GyrB (Gyrase B) and GyrB: dimerization induced by coumermycin;
[0378] (f) DHFR (dihydrofolate reductase) and DHFR: dimerization induced by methotrexate);
[0379] (g) DmrB and DmrB: dimerization induced by AP20187;
[0380] (h) PYL and ABI: dimerization induced by abscisic acid;
[0381] (i) Cry2 and CIB1: dimerization induced by blue light; and
[0382] (j) GAI and GID1: dimerization induced by gibberellin.

[0383] A member (a first and/or a second member) of a binding pair (e.g., a dimerizer-binding pair) of a subject Cas9 heterodimer can have a length in a range of from 35 to 300 amino acids (e.g., from 35 to 250, from 35 to 200, from 35 to 150, from 35 to 100, from 35 to 50, from 50 to 300, from 50 to 250, from 50 to 200, from 50 to 150, from 50 to 100, from 100 to 300, from 100 to 250, from 100 to 200, from 100 to 150, from 150 to 300, from 150 to 250, from 150 to 200, from 200 to 300, from 200 to 250, or from 250 to 300 amino acids).

[0384] In some cases, a member of a dimer (e.g., a dimerizer-binding pair) of a subject Cas9 heterodimer is derived from FKBP1A (also known as FKBP12, FKBP1; PKC12; PKC12; PPIASE; FKBP-12; FKBP-1A). For example, a suitable dimerizer-binding pair member can include a rapamycin binding portion of FKBP1A. For example, a suitable dimerizer-binding pair member can comprise an amino acid sequence having 75% or more amino acid sequence identity (e.g., 80% or more, 85% or more, 90% or more, 95% or more, 98% or more, or 100% amino acid sequence identity) to the following amino acid sequence (a rapamycin binding portion of FKBP1A):

(SEQ ID NO: 1559)

GVQVETISPGDGRTFPKRGQTCVVHYTGMLEDGKKFDSSRDRNKPFKFML
GKQEVIRGWEEGVAQMSVGQRAKLTISPDYAYGATGHPGIIPPHATLVFD
VELLKLE.

[0385] In some cases, a member of a dimerizer-binding pair of a Cas9 heterodimer is derived from protein phosphatase 3, catalytic subunit, alpha isozyme (PPP3CA) (also known as “Serine/threonine-protein phosphatase 2B catalytic subunit alpha isoform”; CNA; CALN; CALNA; CALNA1; CCN1; CNA1; PPP2B; “CAM-PRP catalytic subunit”; and “calmodulin-dependent calcineurin A subunit alpha isoform”). For example, a suitable dimerizer-binding pair member can include a binding portion of PPP3CA. For example, a suitable dimerizer-binding pair member can comprise an amino acid sequence having 75% or more amino acid sequence identity (e.g., 80% or more, 85% or more, 90% or more, 95% or more, 98% or more, or 100% amino acid sequence identity) to the following amino acid sequence (PP2Ac domain):

(SEQ ID NO: 1560)

LEESVALRIITEGASILRQEKNLLDIDAPVTVCGDIHGQFFDLMKLFEVG
GSPANTRYLFLGDYVDRGYFSIECVLYLWALKILYPKTLFLLRGNHECRH
LTEYFTFKQECKIKYSERVYDACMDAFDCLPLAALMNQQFLCVHGGLSPE
INTLDDIRKLDRFKEPPAYGPMCDILWSDPLEDFGNEKTQEHFTHNTVRG
CSYFYSYPAVCEFLQHNNLLSILRAHEAQDAGYRMYRKSQTTGFPSLITI
FSAPNYLDVYNNKAAVLKYENNVMNIRQFNCSPHPYWLPNFM.

[0386] In some cases, a member of a dimer (e.g., a dimerizer-binding pair) is derived from cyclophilin (also known cyclophilin A, PPIA, CYPA, CYPH, PPIase A, etc.). For example, a suitable dimerizer-binding pair member can include a binding portion of cyclophilin. For example, a suitable dimerizer-binding pair member can include an amino acid sequence having 75% or more amino acid sequence identity (e.g., 80% or more, 85% or more, 90% or more, 95% or more, 98% or more, or 100% amino acid sequence identity) to the following amino acid sequence:

(SEQ ID NO: 1561)

MVNPTVFFDIAVDGEPLGRVSFELFADKVPKTAENFRALSTGEKGFGYKG
SCFHRIIPGFMCQGGDFTRHNGTGGKSIYGEKFEDENFILKHTGPGILSM
ANAGPNTNGSQFFICTAKTEWLDGKHVVFGKVKEGMNIVEAMERFGSRNG
KTSKKITIADCGQLE.

[0387] In some cases, a member of a dimer (e.g., a dimerizer-binding pair) is derived from MTOR (also known as FKBP-rapamycin associated protein; FK506 binding protein 12-rapamycin associated protein 1; FK506 binding protein 12-rapamycin associated protein 2; FK506-binding protein 12-rapamycin complex-associated protein 1; FRAP; FRAP1; FRAP2; RAFT1; and RAPT1). For example, a suitable dimerizer-binding pair member can include the Fkbp-Rapamycin Binding Domain (also known as FRB). For example, a suitable dimerizer-binding pair member can include an amino acid sequence having 75% or more amino acid sequence identity (e.g., 80% or more, 85% or more, 90% or more, 95% or more, 98% or more, or 100% amino acid sequence identity) to the following amino acid sequence (FRB):

(SEQ ID NO: 1562)

VAILWHEMWHEGLEEASRLYFGERNVKGMFEVLEPLHAMMERGPQTLKET
SFNQAYGRDLMEAQEWCRKYMKSGNVKDLTQAWDLYYHVFRRIS.

[0388] In some cases, a member of a dimer (e.g., a dimerizer-binding pair) is derived from GyrB (also known as DNA gyrase subunit B). For example, a suitable dimerizer-binding pair member can include an amino acid sequence having 75% or more amino acid sequence identity (e.g., 80% or more, 85% or more, 90% or more, 95% or more, 98% or more, or 100% amino acid sequence identity) to a contiguous stretch of from about 100 amino acids to about 200 amino acids (aa), from about 200 aa to about 300 aa, from about 300 aa to about 400 aa, from about 400 aa to about 500 aa, from about 500 aa to about 600 aa, from about 600 aa to about 700 aa, or from about 700 aa to about 800 aa, of the following GyrB amino acid sequence from Escherichia coli (or to the DNA gyrase subunit B sequence from any organism):

MSNSYDSSSIKVLKGLDAVRKRPGMYIGDTDDGTGLHHMVFEVVDNAIDEALAGHCKE IIVTIHADNSVSVQDDGRGIPTGIHPEEGVSAAEVIMTVLHAGGKFDDNSYKVSGGLHGV GVSVVNALSQKLELVIQREGKIHRQIYEHGVPQAPLAVTGETEKTGTMVRFWPSLETFT NVTEFEYEILAKRLRELSFLNSGVSIRLRDKRDGKEDHFHYEGGIKAFVEYLNKNKTPIH PNIFYFSTEKDGIGVEVALQWNDGFQENIYCFTNNIPQRDGGTHLAGFRAAMTRTLNAY MDKEGYSKKAKVSATGDDAREGLIAVVSVKVPDPKFSSQTKDKLVSSEVKSAVEQQM NELLAEYLLENPTDAKIVVGKIIDAARAREAARRAREMTRRKGALDLAGLPGKLADCQ ERDPALSELYLVEGDSAGGSAKQGRNRKNQAILPLKGKILNVEKARFDKMLSSQEVATL ITALGCGIGRDEYNPDKLRYHSIIIMTDADVDGSHIRTLLLTFFYRQMPEIVERGHVYIAQ PPLYKVKKGKQEQYIKDDEAMDQYQISIALDGATLHTNASAPALAGEALEKLVSEYNA TQKMINRMERRYPKAMLKELIYQPTLTEADLSDEQTVTRWVNALVSELNDKEQHGSQ WKFDVHTNAEQNLFEPIVRVRTHGVDTDYPLDHEFITGGEYRRICTLGEKLRGLLEEDA FIERGERRQPVASFEQALDWLVKESRRGLSIQRYKGLGEMNPEQLWETTMDPESRRML RVTVKDAIAADQLFTTLMGDAVEPRRAFIEENALKAANIDI (SEQ ID NO:1563). In some cases, a member of a dimerizer-binding pair includes an amino acid sequence having 75% or more amino acid sequence identity (e.g., 80% or more, 85% or more, 90% or more, 95% or more, 98% or more, or 100% amino acid sequence identity) to amino acids 1-220 of the above-listed GyrB amino acid sequence from Escherichia coli.

[0389] In some cases, a member of a dimer (e.g., a dimerizer-binding pair) is derived from DHFR (also known as dihydrofolate reductase, DHFRP1, and DYR). For example, a suitable dimerizer-binding pair member can include an amino acid sequence having 75% or more amino acid sequence identity (e.g., 80% or more, 85% or more, 90% or more, 95% or more, 98% or more, or 100% amino acid sequence identity) to the following amino acid sequence:

(SEQ ID NO: 1564)

MVGSLNCIVAVSQNMGIGKNGDLPWPPLRNEFRYFQRMTTTSSVEGKQNL
VIMGKKTWFSIPEKNRPLKGRINLVLSRELKEPPQGAHFLSRSLDDALKL
TEQPELANKVDMVWIVGGSSVYKEAMNHPGHLKLFVTRIMQDFESDTFFP
EIDLEKYKLLPEYPGVLSDVQEEKGIKYKFEVYEKND.

[0390] In some cases, a member of a dimer (e.g., a dimerizer-binding pair) is derived from the DmrB binding domain (i.e., DmrB homodimerization domain). For example, a suitable dimerizer-binding pair member can include an amino acid sequence having 75% or more amino acid sequence identity (e.g., 80% or more, 85% or more, 90% or more, 95% or more, 98% or more, or 100% amino acid sequence identity) to the following amino acid sequence:

(SEQ ID NO: 1565)

MASRGVQVETISPGDGRTFPKRGQTCVVHYTGMLEDGKKVDSSRDRNKPF
KFMLGKQEVIRGWEEGVAQMSVGQRAKLTISPDYAYGATGHPGIIPPHAT
LVFDVELLKLE.

[0391] In some cases, a member of a dimer (e.g., a dimerizer-binding pair) is derived from a PYL protein (also known as abscisic acid receptor and as RCAR). For example a member of a subject dimerizer-binding pair can be derived from proteins such as those of Arabidopsis thaliana: PYR1, RCAR1(PYL9), PYL1, PYL2, PYL3, PYL4, PYL5, PYL6, PYL7, PYL8 (RCAR3), PYL10, PYL11, PYL12, PYL13. For example, a suitable dimerizer-binding pair member can include an amino acid sequence having 75% or more amino acid sequence identity (e.g., 80% or more, 85% or more, 90% or more, 95% or more, 98% or more, or 100% amino acid sequence identity) to the following amino acid sequences:

PYL10:

(SEQ ID NO: 1566)

MNGDETKKVESEYIKKHHRHELVESQCSSTLVKHIKAPLHLVWSIVRRFD
EPQKYKPFISRCVVQGKKLEVGSVREVDLKSGLPATKSTEVLEILDDNEH
ILGIRIVGGDHRLKNYSSTISLHSETIDGKTGTLAIESFVVDVPEGNTKE
ETCFFVEALIQCNLNSLADVTERLQAESMEKKI.
PYL11:

(SEQ ID NO: 1567)

METSQKYHTCGSTLVQTIDAPLSLVWSILRRFDNPQAYKQFVKTCNLSSG
DGGEGSVREVTVVSGLPAEFSRERLDELDDESHVMMISIIGGDHRLVNYR
SKTMAFVAADTEEKTVVVESYVVDVPEGNSEEETTSFADTIVGFNLKSLA
KLSERVAHLKL
PYL12:

(SEQ ID NO: 1568)

MKTSQEQHVCGSTVVQTINAPLPLVWSILRRFDNPKTFKHFVKTCKLRSG
DGGEGSVREVTVVSDLPASFSLERLDELDDESHVMVISIIGGDHRLVNYQ
SKTTVFVAAEEEKTVVVESYVVDVPEGNTEEETTLFADTIVGCNLRSLAK
LSEKMMELT.
PYL13:

(SEQ ID NO: 1569)

MESSKQKRCRSSVVETIEAPLPLVWSILRSFDKPQAYQRFVKSCTMRSGG
GGGKGGEGKGSVRDVTLVSGFPADFSTERLEELDDESHVMVVSIIGGNHR
LVNYKSKTKVVASPEDMAKKTVVVESYVVDVPEGTSEEDTIFFVDNIIRY
NLTSLAKLTKKMMK.
PYL1:

(SEQ ID NO: 1570)

MANSESSSSPVNEEENSQRISTLHHQTMPSDLTQDEFTQLSQSIAEFHTY
QLGNGRCSSLLAQRIHAPPETVWSVVRRFDRPQIYKHFIKSCNVSEDFEM
RVGCTRDVNVISGLPANTSRERLDLLDDDRRVTGFSITGGEHRLRNYKSV
TTVHRFEKEEEEERIWTVVLESYVVDVPEGNSEEDTRLFADTVIRLNLQK
LASITEAMNRNNNNNNSSQVR.
PYL2:

(SEQ ID NO: 1571)

MSSSPAVKGLTDEEQKTLEPVIKTYHQFEPDPTTCTSLITQRIHAPASVV
WPLIRRFDNPERYKHFVKRCRLISGDGDVGSVREVTVISGLPASTSTERL
EFVDDDHRVLSFRVVGGEHRLKNYKSVTSVNEFLNQDSGKVYTVVLESYT
VDIPEGNTEEDTKMFVDTVVKLNLQKLGVAATSAPMHDDE.
PYL3:

(SEQ ID NO: 1572)

MNLAPIHDPSSSSTTTTSSSTPYGLTKDEFSTLDSIIRTHHTFPRSPNTC
TSLIAHRVDAPAHAIWRFVRDFANPNKYKHFIKSCTIRVNGNGIKEIKVG
TIREVSVVSGLPASTSVEILEVLDEEKRILSFRVLGGEHRLNNYRSVTSV
NEFVVLEKDKKKRVYSVVLESYIVDIPQGNTEEDTRMFVDTVVKSNLQNL
AVISTASPT.
PYL4:

(SEQ ID NO: 1573)

MLAVHRPSSAVSDGDSVQIPMMIASFQKRFPSLSRDSTAARFHTHEVGPN
QCCSAVIQEISAPISTVWSVVRRFDNPQAYKHFLKSCSVIGGDGDNVGSL
RQVHVVSGLPAASSTERLDILDDERHVISFSVVGGDHRLSNYRSVTTLHP
SPISGTVVVESYVVDVPPGNTKEETCDFVDVIVRCNLQSLAKIAENTAAE
SKKKMSL.
PYL5:

(SEQ ID NO: 1574)

MRSPVQLQHGSDATNGFHTLQPHDQTDGPIKRVCLTRGMHVPEHVAMHHT
HDVGPDQCCSSVVQMIHAPPESVWALVRRFDNPKVYKNFIRQCRIVQGDG
LHVGDLREVMVVSGLPAVSSTERLEILDEERHVISFSVVGGDHRLKNYRS
VTTLHASDDEGTVVVESYIVDVPPGNTEEETLSFVDTIVRCNLQSLARST
NRQ.
PYL6:

(SEQ ID NO: 1575)

MPTSIQFQRSSTAAEAANATVRNYPHHHQKQVQKVSLTRGMADVPEHVEL
SHTHVVGPSQCFSVVVQDVEAPVSTVWSILSRFEHPQAYKHFVKSCHVVI
GDGREVGSVREVRVVSGLPAAFSLERLEIMDDDRHVISFSVVGGDHRLMN
YKSVTTVHESEEDSDGKKRTRVVESYVVDVPAGNDKEETCSFADTIVRCN
LQSLAKLAENTSKFS.
PYL7:

(SEQ ID NO: 1576)

MEMIGGDDTDTEMYGALVTAQSLRLRHLHHCRENQCTSVLVKYIQAPVHL
VWSLVRRFDQPQKYKPFISRCTVNGDPEIGCLREVNVKSGLPATTSTERL
EQLDDEEHILGINIIGGDHRLKNYSSILTVHPEMIDGRSGTMVMESFVVD
VPQGNTKDDTCYFVESLIKCNLKSLACVSERLAAQDITNSIATFCNASNG
YREKNHTETNL.
PYL8:

(SEQ ID NO: 1577)

MEANGIENLTNPNQEREFIRRHHKHELVDNQCSSTLVKHINAPVHIVWSL
VRRFDQPQKYKPFISRCVVKGNMEIGTVREVDVKSGLPATRSTERLELLD
DNEHILSIRIVGGDHRLKNYSSIISLHPETIEGRIGTLVIESFVVDVPEG
NTKDETCYFVEALIKCNLKSLADISERLAVQDTTESRV.
PYL9:

(SEQ ID NO: 1578)

MMDGVEGGTAMYGGLETVQYVRTHHQHLCRENQCTSALVKHIKAPLHLVW
SLVRRFDQPQKYKPFVSRCTVIGDPEIGSLREVNVKSGLPATTSTERLEL
LDDEEHILGIKIIGGDHRLKNYSSILTVHPEIIEGRAGTMVIESFVVDVP
QGNTKDETCYFVEALIRCNLKSLADVSER
LASQDITQ.
PYR1:

(SEQ ID NO: 1579)

MPSELTPEERSELKNSIAEFHTYQLDPGSCSSLHAQRIHAPPELVWSIVR
RFDKPQTYKHFIKSCSVEQNFEMRVGCTRDVIVISGLPANTSTERLDILD
DERRVTGFSIIGGEHRLTNYKSVTTVHRFEKENRIWTVVLESYVVDMPEG
NSEDDTRMFADTVVKLNLQKLATVAEAMARNSGDGSGSQVT.

[0392] In some cases, a member of a dimer (e.g., a dimerizer-binding pair) is derived from an ABI protein (also known as Abscisic Acid-Insensitive). For example a member of a subject dimerizer-binding pair can be derived from proteins such as those of Arabidopsis thaliana: ABI1 (Also known as ABSCISIC ACID-INSENSITIVE 1, Protein phosphatase 2C 56, AtPP2C56, P2C56, and PP2C ABI1) and/or ABI2 (also known as P2C77, Protein phosphatase 2C 77, AtPP2C77, ABSCISIC ACID-INSENSITIVE 2, Protein phosphatase 2C ABI2, and PP2C ABI2). For example, a suitable dimerizer-binding pair member can include an amino acid sequence having 75% or more amino acid sequence identity (e.g., 80% or more, 85% or more, 90% or more, 95% or more, 98% or more, or 100% amino acid sequence identity) to a contiguous stretch of from about 100 amino acids to about 110 amino acids (aa), from about 110 aa to about 115 aa, from about 115 aa to about 120 aa, from about 120 aa to about 130 aa, from about 130 aa to about 140 aa, from about 140 aa to about 150 aa, from about 150 aa to about 160 aa, from about 160 aa to about 170 aa, from about 170 aa to about 180 aa, from about 180 aa to about 190 aa, or from about 190 aa to about 200 aa of any of the following amino acid sequences:

ABI1:

(SEQ ID NO: 1580)

MEEVSPAIAGPFRPFSETQMDFTGIRLGKGYCNNQYSNQDSENGDLMVSL
PETSSCSVSGSHGSESRKVLISRINSPNLNMKESAAADIVVVDISAGDEI
NGSDITSEKKMISRTESRSLFEFKSVPLYGFTSICGRRPEMEDAVSTIPR
FLQSSSGSMLDGRFDPQSAAHFFGVYDGHGGSQVANYCRERMHLALAEEI
AKEKPMLCDGDTWLEKWKKALFNSFLRVDSEIESVAPETVGSTSVVAVVF
PSHIFVANCGDSRAVLCRGKTALPLSVDHKPDREDEAARIEAAGGKVIQW
NGARVFGVLAMSRSIGDRYLKPSIIPDPEVTAVKRVKEDDCLILASDGVW
DVMTDEEACEMARKRILLWHKKNAVAGDASLLADERRKEGKDPAAMSAAE
YLSKLAIQRGSKDNISVVVVDLKPRRKLKSKPLN.
ABI2:

(SEQ ID NO: 1581)

MDEVSPAVAVPFRPFTDPHAGLRGYCNGESRVTLPESSCSGDGAMKDSSF
EINTRQDSLTSSSSAMAGVDISAGDEINGSDEFDPRSMNQSEKKVLSRTE
SRSLFEFKCVPLYGVTSICGRRPEMEDSVSTIPRFLQVSSSSLLDGRVTN
GFNPHLSAHFFGVYDGHGGSQVANYCRERMHLALTEEIVKEKPEFCDGDT
WQEKWKKALFNSFMRVDSEIETVAHAPETVGSTSVVAVVFPTHIFVANCG
DSRAVLCRGKTPLALSVDHKPDRDDEAARIEAAGGKVIRWNGARVFGVLA
MSRSIGDRYLKPSVIPDPEVTSVRRVKEDDCLILASDGLWDVMTNEEVCD
LARKRILLWHKKNAMAGEALLPAEKRGEGKDPAAMSAAEYLSKMALQKGS
KDNISVVVVDLKGIRKFKSKSLN.

[0393] In some cases, a member of a dimer (e.g., a dimerizer-binding pair) is derived from a Cry2 protein (also known as cryptochrome 2). For example a member of a subject dimer (e.g., a dimerizer-binding pair) can be derived from Cry2 proteins from any organism (e.g., a plant) such as, but not limited to, those of Arabidopsis thaliana. For example, a suitable dimerizer-binding pair member can include an amino acid sequence having 75% or more amino acid sequence identity (e.g., 80% or more, 85% or more, 90% or more, 95% or more, 98% or more, or 100% amino acid sequence identity) to a contiguous stretch of from about 100 amino acids to about 110 amino acids (aa), from about 110 aa to about 115 aa, from about 115 aa to about 120 aa, from about 120 aa to about 130 aa, from about 130 aa to about 140 aa, from about 140 aa to about 150 aa, from about 150 aa to about 160 aa, from about 160 aa to about 170 aa, from about 170 aa to about 180 aa, from about 180 aa to about 190 aa, or from about 190 aa to about 200 aa of any of the following amino acid sequences:

Cry2 (Arabidopsis thaliana)

(SEQ ID NO: 1582)

MKMDKKTIVWFRRDLRIEDNPALAAAAHEGSVFPVFIWCPEEEGQFYPGR
ASRWWMKQSLAHLSQSLKALGSDLTLIKTHNTISAILDCIRVTGATKVVF
NHLYDPVSLVRDHTVKEKLVERGISVQSYNGDLLYEPWEIYCEKGKPFTS
FNSYWKKCLDMSIESVMLPPPWRLMPITAAAEAIWACSIEELGLENEAEK
PSNALLTRAWSPGWSNADKLLNEFIEKQLIDYAKNSKKVVGNSTSLLSPY
LHFGEISVRHVFQCARMKQIIWARDKNSEGEESADLFLRGIGLREYSRYI
CFNFPFTHEQSLLSHLRFFPWDADVDKFKAWRQGRTGYPLVDAGMRELWA
TGWMHNRIRVIVSSFAVKFLLLPWKWGMKYFWDTLLDADLECDILGWQYI
SGSIPDGHELDRLDNPALQGAKYDPEGEYIRQWLPELARLPTEWIHHPWD
APLTVLKASGVELGTNYAKPIVDIDTARELLAKAISRTREAQIMIGAAPD
EIVADSFEALGANTIKEPGLCPSVSSNDQQVPSAVRYNGSKRVKPEEEEE
RDMKKSRGFDERELFSTAESSSSSSVFFVSQSCSLASEGKNLEGIQDSSD
QITTSLGKNGCK.

[0394] In some cases, a member of a dimer (e.g., a dimerizer-binding pair) is derived from the CIB1 Arabidopsis thaliana protein (also known as transcription factor bHLH63). For example, a suitable dimer (e.g., a dimerizer-binding pair) member can include an amino acid sequence having 75% or more amino acid sequence identity (e.g., 80% or more, 85% or more, 90% or more, 95% or more, 98% or more, or 100% amino acid sequence identity) to a contiguous stretch of from about 100 amino acids to about 110 amino acids (aa), from about 110 aa to about 115 aa, from about 115 aa to about 120 aa, from about 120 aa to about 130 aa, from about 130 aa to about 140 aa, from about 140 aa to about 150 aa, from about 150 aa to about 160 aa, from about 160 aa to about 170 aa, from about 170 aa to about 180 aa, from about 180 aa to about 190 aa, or from about 190 aa to about 200 aa of the following amino acid sequence:

(SEQ ID NO: 1583)

MNGAIGGDLLLNFPDMSVLERQRAHLKYLNPTFDSPLAGFFADSSMITGG
EMDSYLSTAGLNLPMMYGETTVEGDSRLSISPETTLGTGNFKKRKFDTET
KDCNEKKKKMTMNRDDLVEEGEEEKSKITEQNNGSTKSIKKMKHKAKKEE
NNFSNDSSKVTKELEKTDYIHVRARRGQATDSHSIAERVRREKISERMKF
LQDLVPGCDKITGKAGMLDEIINYVQSLQRQIEFLSMKLAIVNPRPDFDM
DDIFAKEVASTPMTVVPSPEMVLSGYSHEMVHSGYSSEMVNSGYLHVNPM
QQVNTSSDPLSCFNNGEAPSMWDSHVQNLYGNLGV.

[0395] In some cases, a member of a dimer (e.g., a dimerizer-binding pair) is derived from the GAI Arabidopsis thaliana protein (also known as Gibberellic Acid Insensitive, and DELLA protein GAI). For example, a suitable dimerizer-binding pair member can include an amino acid sequence having 75% or more amino acid sequence identity (e.g., 80% or more, 85% or more, 90% or more, 95% or more, 98% or more, or 100% amino acid sequence identity) to a contiguous stretch of from about 100 amino acids to about 110 amino acids (aa), from about 110 aa to about 115 aa, from about 115 aa to about 120 aa, from about 120 aa to about 130 aa, from about 130 aa to about 140 aa, from about 140 aa to about 150 aa, from about 150 aa to about 160 aa, from about 160 aa to about 170 aa, from about 170 aa to about 180 aa, from about 180 aa to about 190 aa, or from about 190 aa to about 200 aa of the following amino acid sequence:

(SEQ ID NO: 1584)

MKRDHHHHHHQDKKTMMMNEEDDGNGMDELLAVLGYKVRSSEMADVAQKL
EQLEVMMSNVQEDDLSQLATETVHYNPAELYTWLDSMLTDLNPPSSNAEY
DLKAIPGDAILNQFAIDSASSSNQGGGGDTYTTNKRLKCSNGVVETTTAT
AESTRHVVLVDSQENGVRLVHALLACAEAVQKENLTVAEALVKQIGFLAV
SQIGAMRKVATYFAEALARRIYRLSPSQSPIDHSLSDTLQMHFYETCPYL
KFAHFTANQAILEAFQGKKRVHVIDFSMSQGLQWPALMQALALRPGGPPV
FRLTGIGPPAPDNFDYLHEVGCKLAHLAEAIHVEFEYRGFVANTLADLDA
SMLELRPSEIESVAVNSVFELHKLLGRPGAIDKVLGVVNQIKPEIFTVVE
QESNHNSPIFLDRFTESLHYYSTLFDSLEGVPSGQDKVMSEVYLGKQICN
VVACDGPDRVERHETLSQWRNRFGSAGFAAAHIGSNAFKQASMLLALFNG
GEGYRVEESDGCLMLGWHTRPLIATSAWKLSTN.

[0396] In some cases, a member of a dimer (e.g., a dimerizer-binding pair) is derived from a GID1 Arabidopsis thaliana protein (also known as Gibberellin receptor GID1). For example, a suitable dimer member can include an amino acid sequence having 75% or more amino acid sequence identity (e.g., 80% or more, 85% or more, 90% or more, 95% or more, 98% or more, or 100% amino acid sequence identity) to a contiguous stretch of from about 100 amino acids to about 110 amino acids (aa), from about 110 aa to about 115 aa, from about 115 aa to about 120 aa, from about 120 aa to about 130 aa, from about 130 aa to about 140 aa, from about 140 aa to about 150 aa, from about 150 aa to about 160 aa, from about 160 aa to about 170 aa, from about 170 aa to about 180 aa, from about 180 aa to about 190 aa, or from about 190 aa to about 200 aa of any of the following amino acid sequences:

GID1A:

(SEQ ID NO: 1585)

MAASDEVNLIESRTVVPLNTWVLISNFKVAYNILRRPDGTFNRHLAEYLD
RKVTANANPVDGVFSFDVLIDRRINLLSRVYRPAYADQEQPPSILDLEKP
VDGDIVPVILFFHGGSFAHSSANSAIYDTLCRRLVGLCKCVVVSVNYRRA
PENPYPCAYDDGWIALNWVNSRSWLKSKKDSKVHIFLAGDSSGGNIAHNV
ALRAGESGIDVLGNILLNPMFGGNERTESEKSLDGKYFVTVRDRDWYWKA
FLPEGEDREHPACNPFSPRGKSLEGVSFPKSLVVVAGLDLIRDWQLAYAE
GLKKAGQEVKLMHLEKATVGFYLLPNNNHFHNVMDEISAFVNAEC.
GID1B:

(SEQ ID NO: 1586)

MAGGNEVNLNECKRIVPLNTWVLISNFKLAYKVLRRPDGSFNRDLAEFLD
RKVPANSFPLDGVFSFDHVDSTTNLLTRIYQPASLLHQTRHGTLELTKPL
STTEIVPVLIFFHGGSFTHSSANSAIYDTFCRRLVTICGVVVVSVDYRRS
PEHRYPCAYDDGWNALNWVKSRVWLQSGKDSNVYVYLAGDSSGGNIAHNV
AVRATNEGVKVLGNILLHPMFGGQERTQSEKTLDGKYFVTIQDRDWYWRA
YLPEGEDRDHPACNPFGPRGQSLKGVNFPKSLVVVAGLDLVQDWQLAYVD
GLKKTGLEVNLLYLKQATIGFYFLPNNDHFHCLMEELNKFVHSIEDSQSK
SSPVLLTP
GID1C:

(SEQ ID NO: 1587)

MAGSEEVNLIESKTVVPLNTWVLISNFKLAYNLLRRPDGTFNRHLAEFLD
RKVPANANPVNGVFSFDVIIDRQTNLLSRVYRPADAGTSPSITDLQNPVD
GEIVPVIVFFHGGSFAHSSANSAIYDTLCRRLVGLCGAVVVSVNYRRAPE
NRYPCAYDDGWAVLKWVNSSSWLRSKKDSKVRIFLAGDSSGGNIVHNVAV
RAVESRIDVLGNILLNPMFGGTERTESEKRLDGKYFVTVRDRDWYWRAFL
PEGEDREHPACSPFGPRSKSLEGLSFPKSLVVVAGLDLIQDWQLKYAEGL
KKAGQEVKLLYLEQATIGFYLLPNNNHFHTVMDEIAAFVNAECQ.

### Dimerizers

[0397] Dimerizers (“dimerizing agents”) that can provide for dimerization of a first member of a dimerizer-binding pair and a second member of a dimerizer-binding pair include, e.g. (where the dimerizer is in parentheses following the dimerizer-binding pair):

a) FKBP1A and FKBP1A (rapamycin and/or a rapamycin analog, rapalog);
b) FKBP1A and FRB (rapamycin and/or a rapamycin analog, rapalog);
c) FKBP1A and PPP3CA (rapamycin and/or a rapamycin analog, rapalog);
d) FKBP1A and cyclophilin (rapamycin and/or a rapamycin analog, rapalog);
e) GyrB and GyrB (coumermycin);
f) DHFR and DHFR (methotrexate);

### g) DmrB and DmrB (AP20187);

[0398] h) PYL and ABI (abscisic acid);
i) Cry2 and CIB1 (blue light); and
j) GAI and GID1 (gibberellin).

[0399] As noted above, rapamycin can serve as a dimerizer. Alternatively, a rapamycin derivative or analog can be used. See, e.g., WO96/41865; WO 99/36553; WO 01/14387; and Ye et al (1999) Science 283:88-91. For example, analogs, homologs, derivatives and other compounds related structurally to rapamycin (“rapalogs”) include, among others, variants of rapamycin having one or more of the following modifications relative to rapamycin: demethylation, elimination or replacement of the methoxy at C7, C42 and/or C29; elimination, derivatization or replacement of the hydroxy at C13, C43 and/or C28; reduction, elimination or derivatization of the ketone at C14, C24 and/or C30; replacement of the 6-membered pipecolate ring with a 5-membered prolyl ring; and alternative substitution on the cyclohexyl ring or replacement of the cyclohexyl ring with a substituted cyclopentyl ring. Additional information is presented in, e.g., U.S. Pat. Nos. 5,525,610; 5,310,903 5,362,718; and 5,527,907. Selective epimerization of the C-28 hydroxyl group has been described; see, e.g., WO 01/14387. Additional synthetic dimerizing agents suitable for use as an alternative to rapamycin include those described in U.S. Patent Publication No. 2012/0130076.

[0400] Rapamycin has the structure:

[chemical structure]

[0401] Suitable rapalogs include, e.g.,

[chemical structure]

[0402] Also suitable as a rapalog is a compound of the formula:

[chemical structure]

where n is 1 or 2; R²⁸ and R⁴³ are independently H, or a substituted or unsubstituted aliphatic or acyl moiety; one of R^{7a} and R^{7b} is H and the other is halo, R^{A}, OR^{A}, SR^{A}, —OC(O)R^{A}, —OC(O)NR^{A}R^{B}, —NR^{A}R^{B}, —NR^{B}C(OR)R^{A}, NR^{B}C(O)OR^{A}, —NR^{B}SO₂R^{A}, or NR^{B}SO₂NR^{A}R^{B′}; or R^{7a} and R^{7b}, taken together, are H in the tetraene moiety:

[chemical structure]

where R^{A} is H or a substituted or unsubstituted aliphatic, heteroaliphatic, aryl, or heteroaryl moiety and where R^{B} and R^{B′} are independently H, OH, or a substituted or unsubstituted aliphatic, heteroaliphatic, aryl, or heteroaryl moiety.

[0403] As noted above, coumermycin can serve as a dimerizing agent. Alternatively, a coumermycin analog can be used. See, e.g., Farrar et al. (1996) Nature 383:178-181; and U.S. Pat. No. 6,916,846.

[0404] As noted above, in some cases, the dimerizing agent is methotrexate, e.g., a non-cytotoxic, homo-bifunctional methotrexate dimer. See, e.g., U.S. Pat. No. 8,236,925.

[0405] Examples of Cas9 Heterodimers

[0406] In some embodiments, a Cas9 heterodimer comprises: A) a first fusion polypeptide comprising: a) a first polypeptide comprising: i) a RuvCI polypeptide; ii) a RuvCII polypeptide; iii) an HNH polypeptide; iv) a RuvCIII polypeptide; and v) a PAM-interacting polypeptide; and b) a first fusion partner, where the first fusion partner is a first member of a dimerization pair; and B) a second fusion polypeptide comprising: a) an alpha-helical recognition region; and b) a second fusion partner, where the second fusion partner is a second member of a dimerization pair.

[0407] In some embodiments, a Cas9 heterodimer comprises: A) a first fusion polypeptide comprising: a) a first polypeptide comprising: i) a RuvCI polypeptide; ii) a RuvCII polypeptide; iii) an HNH polypeptide; iv) a RuvCIII polypeptide; and v) a PAM-interacting polypeptide; and b) a first fusion partner, where the first fusion partner is an FKBP1A polypeptide; and B) a second fusion polypeptide comprising: a) an alpha-helical recognition region; and b) a second fusion partner, where the second fusion partner is an FKBP1A polypeptide.

[0408] In some embodiments, a Cas9 heterodimer comprises: A) a first fusion polypeptide comprising: a) a first polypeptide comprising: i) a RuvCI polypeptide; ii) a RuvCII polypeptide; iii) an HNH polypeptide; iv) a RuvCIII polypeptide; and v) a PAM-interacting polypeptide; and b) a first fusion partner, where the first fusion partner is an FKBP1A polypeptide; and B) a second fusion polypeptide comprising: a) an alpha-helical recognition region; and b) a second fusion partner, where the second fusion partner is an FRB polypeptide. In some embodiments, a Cas9 heterodimer comprises: A) a first fusion polypeptide comprising: a) a first polypeptide comprising: i) a RuvCI polypeptide; ii) a RuvCII polypeptide; iii) an HNH polypeptide; iv) a RuvCIII polypeptide; and v) a PAM-interacting polypeptide; and b) a first fusion partner, where the first fusion partner is an FRB polypeptide; and B) a second fusion polypeptide comprising: a) an alpha-helical recognition region; and b) a second fusion partner, where the second fusion partner is an FKBP1A polypeptide.

[0409] In some embodiments, a Cas9 heterodimer comprises: A) a first fusion polypeptide comprising: a) a first polypeptide comprising: i) a RuvCI polypeptide; ii) a RuvCII polypeptide; iii) an HNH polypeptide; iv) a RuvCIII polypeptide; and v) a PAM-interacting polypeptide; and b) a first fusion partner, where the first fusion partner is an FKBP1A polypeptide; and B) a second fusion polypeptide comprising: a) an alpha-helical recognition region; and b) a second fusion partner, where the second fusion partner is a PPP3CA polypeptide. In some embodiments, a Cas9 heterodimer comprises: A) a first fusion polypeptide comprising: a) a first polypeptide comprising: i) a RuvCI polypeptide; ii) a RuvCII polypeptide; iii) an HNH polypeptide; iv) a RuvCIII polypeptide; and v) a PAM-interacting polypeptide; and b) a first fusion partner, where the first fusion partner is a PPP3CA polypeptide; and B) a second fusion polypeptide comprising: a) an alpha-helical recognition region; and b) a second fusion partner, where the second fusion partner is an FKBP1A polypeptide.

[0410] In some embodiments, a Cas9 heterodimer comprises: A) a first fusion polypeptide comprising: a) a first polypeptide comprising: i) a RuvCI polypeptide; ii) a RuvCII polypeptide; iii) an HNH polypeptide; iv) a RuvCIII polypeptide; and v) a PAM-interacting polypeptide; and b) a first fusion partner, where the first fusion partner is an FKBP1A polypeptide; and B) a second fusion polypeptide comprising: a) an alpha-helical recognition region; and b) a second fusion partner, where the second fusion partner is a cyclophilin polypeptide. In some embodiments, a Cas9 heterodimer comprises: A) a first fusion polypeptide comprising: a) a first polypeptide comprising: i) a RuvCI polypeptide; ii) a RuvCII polypeptide; iii) an HNH polypeptide; iv) a RuvCIII polypeptide; and v) a PAM-interacting polypeptide; and b) a first fusion partner, where the first fusion partner is a cyclophilin polypeptide; and B) a second fusion polypeptide comprising: a) an alpha-helical recognition region; and b) a second fusion partner, where the second fusion partner is an FKBP1A polypeptide.

[0411] In some embodiments, a Cas9 heterodimer comprises: A) a first fusion polypeptide comprising: a) a first polypeptide comprising: i) a RuvCI polypeptide; ii) a RuvCII polypeptide; iii) an HNH polypeptide; iv) a RuvCIII polypeptide; and v) a PAM-interacting polypeptide; and b) a first fusion partner, where the first fusion partner is a GyrB polypeptide; and B) a second fusion polypeptide comprising: a) an alpha-helical recognition region; and b) a second fusion partner, where the second fusion partner is a GyrB polypeptide.

[0412] In some embodiments, a Cas9 heterodimer comprises: A) a first fusion polypeptide comprising: a) a first polypeptide comprising: i) a RuvCI polypeptide; ii) a RuvCII polypeptide; iii) an HNH polypeptide; iv) a RuvCIII polypeptide; and v) a PAM-interacting polypeptide; and b) a first fusion partner, where the first fusion partner is a DHFR polypeptide; and B) a second fusion polypeptide comprising: a) an alpha-helical recognition region; and b) a second fusion partner, where the second fusion partner is a DHFR polypeptide.

[0413] In some embodiments, a Cas9 heterodimer comprises: A) a first fusion polypeptide comprising: a) a first polypeptide comprising: i) a RuvCI polypeptide; ii) a RuvCII polypeptide; iii) an HNH polypeptide; iv) a RuvCIII polypeptide; and v) a PAM-interacting polypeptide; and b) a first fusion partner, where the first fusion partner is a DmrB polypeptide; and B) a second fusion polypeptide comprising: a) an alpha-helical recognition region; and b) a second fusion partner, where the second fusion partner is a DmrB polypeptide.

[0414] In some embodiments, a Cas9 heterodimer comprises: A) a first fusion polypeptide comprising: a) a first polypeptide comprising: i) a RuvCI polypeptide; ii) a RuvCII polypeptide; iii) an HNH polypeptide; iv) a RuvCIII polypeptide; and v) a PAM-interacting polypeptide; and b) a first fusion partner, where the first fusion partner is a PYL polypeptide; and B) a second fusion polypeptide comprising: a) an alpha-helical recognition region; and b) a second fusion partner, where the second fusion partner is an ABI polypeptide. In some embodiments, a Cas9 heterodimer comprises: A) a first fusion polypeptide comprising: a) a first polypeptide comprising: i) a RuvCI polypeptide; ii) a RuvCII polypeptide; iii) an HNH polypeptide; iv) a RuvCIII polypeptide; and v) a PAM-interacting polypeptide; and b) a first fusion partner, where the first fusion partner is an ABI polypeptide; and B) a second fusion polypeptide comprising: a) an alpha-helical recognition region; and b) a second fusion partner, where the second fusion partner is an PYL polypeptide.

[0415] In some embodiments, a Cas9 heterodimer comprises: A) a first fusion polypeptide comprising: a) a first polypeptide comprising: i) a RuvCI polypeptide; ii) a RuvCII polypeptide; iii) an HNH polypeptide; iv) a RuvCIII polypeptide; and v) a PAM-interacting polypeptide; and b) a first fusion partner, where the first fusion partner is a Cyr2 polypeptide; and B) a second fusion polypeptide comprising: a) an alpha-helical recognition region; and b) a second fusion partner, where the second fusion partner is a CIB1 polypeptide. In some embodiments, a Cas9 heterodimer comprises: A) a first fusion polypeptide comprising: a) a first polypeptide comprising: i) a RuvCI polypeptide; ii) a RuvCII polypeptide; iii) an HNH polypeptide; iv) a RuvCIII polypeptide; and v) a PAM-interacting polypeptide; and b) a first fusion partner, where the first fusion partner is a CIB1 polypeptide; and B) a second fusion polypeptide comprising: a) an alpha-helical recognition region; and b) a second fusion partner, where the second fusion partner is an Cry2 polypeptide.

[0416] In some embodiments, a Cas9 heterodimer comprises: A) a first fusion polypeptide comprising: a) a first polypeptide comprising: i) a RuvCI polypeptide; ii) a RuvCII polypeptide; iii) an HNH polypeptide; iv) a RuvCIII polypeptide; and v) a PAM-interacting polypeptide; and b) a first fusion partner, where the first fusion partner is a GAI polypeptide; and B) a second fusion polypeptide comprising: a) an alpha-helical recognition region; and b) a second fusion partner, where the second fusion partner is a GID1 polypeptide. In some embodiments, a Cas9 heterodimer comprises: A) a first fusion polypeptide comprising: a) a first polypeptide comprising: i) a RuvCI polypeptide; ii) a RuvCII polypeptide; iii) an HNH polypeptide; iv) a RuvCIII polypeptide; and v) a PAM-interacting polypeptide; and b) a first fusion partner, where the first fusion partner is a GID1 polypeptide; and B) a second fusion polypeptide comprising: a) an alpha-helical recognition region; and b) a second fusion partner, where the second fusion partner is an GAI polypeptide.

[0417] In some cases, a Cas9 heterodimer comprises: A) a first fusion polypeptide comprising: a) a first, circular permuted, polypeptide that comprises: i) a RuvCI polypeptide; ii) a RuvCII polypeptide; iii) an HNH polypeptide; iv) a RuvCIII polypeptide; and v) a PAM-interacting polypeptide; and b) a first fusion partner, where the first fusion partner is a first member of a dimerization pair; and B) a second fusion polypeptide comprising: a) a second polypeptide that comprises an alpha-helical recognition region; and b) a second fusion partner, where the second fusion partner is a second member of the dimerization pair.

[0418] In some cases, a Cas9 heterodimer comprises: A) a first fusion polypeptide comprising: a) a first, circular permuted, polypeptide that comprises: i) a RuvCI polypeptide; ii) a RuvCII polypeptide; iii) an HNH polypeptide; iv) a RuvCIII polypeptide; and v) a PAM-interacting polypeptide; and b) a first fusion partner, where the first fusion partner is an FKBP1A polypeptide; and B) a second fusion polypeptide comprising: a) a second polypeptide that comprises an alpha-helical recognition region; and b) a second fusion partner, where the second fusion partner is an FKBP1A polypeptide.

[0419] In some cases, a Cas9 heterodimer comprises: A) a first fusion polypeptide comprising: a) a first, circular permuted, polypeptide that comprises: i) a RuvCI polypeptide; ii) a RuvCII polypeptide; iii) an HNH polypeptide; iv) a RuvCIII polypeptide; and v) a PAM-interacting polypeptide; and b) a first fusion partner, where the first fusion partner is an FKBP1A polypeptide; and B) a second fusion polypeptide comprising: a) a second polypeptide that comprises an alpha-helical recognition region; and b) a second fusion partner, where the second fusion partner is an FRB polypeptide. In some cases, a Cas9 heterodimer comprises: A) a first fusion polypeptide comprising: a) a first, circular permuted, polypeptide that comprises: i) a RuvCI polypeptide; ii) a RuvCII polypeptide; iii) an HNH polypeptide; iv) a RuvCIII polypeptide; and v) a PAM-interacting polypeptide; and b) a first fusion partner, where the first fusion partner is an FRB polypeptide; and B) a second fusion polypeptide comprising: a) a second polypeptide that comprises an alpha-helical recognition region; and b) a second fusion partner, where the second fusion partner is an FKBP1A polypeptide.

[0420] In some cases, a Cas9 heterodimer comprises: A) a first fusion polypeptide comprising: a) a first, circular permuted, polypeptide that comprises: i) a RuvCI polypeptide; ii) a RuvCII polypeptide; iii) an HNH polypeptide; iv) a RuvCIII polypeptide; and v) a PAM-interacting polypeptide; and b) a first fusion partner, where the first fusion partner is an FKBP1A polypeptide; and B) a second fusion polypeptide comprising: a) a second polypeptide that comprises an alpha-helical recognition region; and b) a second fusion partner, where the second fusion partner is a PPP3CA polypeptide. In some cases, a Cas9 heterodimer comprises: A) a first fusion polypeptide comprising: a) a first, circular permuted, polypeptide that comprises: i) a RuvCI polypeptide; ii) a RuvCII polypeptide; iii) an HNH polypeptide; iv) a RuvCIII polypeptide; and v) a PAM-interacting polypeptide; and b) a first fusion partner, where the first fusion partner is a PPP3CA polypeptide; and B) a second fusion polypeptide comprising: a) a second polypeptide that comprises an alpha-helical recognition region; and b) a second fusion partner, where the second fusion partner is an FKBP1A polypeptide.

[0421] In some cases, a Cas9 heterodimer comprises: A) a first fusion polypeptide comprising: a) a first, circular permuted, polypeptide that comprises: i) a RuvCI polypeptide; ii) a RuvCII polypeptide; iii) an HNH polypeptide; iv) a RuvCIII polypeptide; and v) a PAM-interacting polypeptide; and b) a first fusion partner, where the first fusion partner is an FKBP1A polypeptide; and B) a second fusion polypeptide comprising: a) a second polypeptide that comprises an alpha-helical recognition region; and b) a second fusion partner, where the second fusion partner is a cyclophilin polypeptide. In some cases, a Cas9 heterodimer comprises: A) a first fusion polypeptide comprising: a) a first, circular permuted, polypeptide that comprises: i) a RuvCI polypeptide; ii) a RuvCII polypeptide; iii) an HNH polypeptide; iv) a RuvCIII polypeptide; and v) a PAM-interacting polypeptide; and b) a first fusion partner, where the first fusion partner is a cyclophilin polypeptide; and B) a second fusion polypeptide comprising: a) a second polypeptide that comprises an alpha-helical recognition region; and b) a second fusion partner, where the second fusion partner is an FKBP1A polypeptide.

[0422] In some cases, a Cas9 heterodimer comprises: A) a first fusion polypeptide comprising: a) a first, circular permuted, polypeptide that comprises: i) a RuvCI polypeptide; ii) a RuvCII polypeptide; iii) an HNH polypeptide; iv) a RuvCIII polypeptide; and v) a PAM-interacting polypeptide; and b) a first fusion partner, where the first fusion partner is a GyrB polypeptide; and B) a second fusion polypeptide comprising: a) a second polypeptide that comprises an alpha-helical recognition region; and b) a second fusion partner, where the second fusion partner is a GyrB polypeptide.

[0423] In some cases, a Cas9 heterodimer comprises: A) a first fusion polypeptide comprising: a) a first, circular permuted, polypeptide that comprises: i) a RuvCI polypeptide; ii) a RuvCII polypeptide; iii) an HNH polypeptide; iv) a RuvCIII polypeptide; and v) a PAM-interacting polypeptide; and b) a first fusion partner, where the first fusion partner is a DHFR polypeptide; and B) a second fusion polypeptide comprising: a) a second polypeptide that comprises an alpha-helical recognition region; and b) a second fusion partner, where the second fusion partner is a DHFR polypeptide.

[0424] In some cases, a Cas9 heterodimer comprises: A) a first fusion polypeptide comprising: a) a first, circular permuted, polypeptide that comprises: i) a RuvCI polypeptide; ii) a RuvCII polypeptide; iii) an HNH polypeptide; iv) a RuvCIII polypeptide; and v) a PAM-interacting polypeptide; and b) a first fusion partner, where the first fusion partner is a DmrB polypeptide; and B) a second fusion polypeptide comprising: a) a second polypeptide that comprises an alpha-helical recognition region; and b) a second fusion partner, where the second fusion partner is a DmrB polypeptide.

[0425] In some cases, a Cas9 heterodimer comprises: A) a first fusion polypeptide comprising: a) a first, circular permuted, polypeptide that comprises: i) a RuvCI polypeptide; ii) a RuvCII polypeptide; iii) an HNH polypeptide; iv) a RuvCIII polypeptide; and v) a PAM-interacting polypeptide; and b) a first fusion partner, where the first fusion partner is a PYL polypeptide; and B) a second fusion polypeptide comprising: a) a second polypeptide that comprises an alpha-helical recognition region; and b) a second fusion partner, where the second fusion partner is an ABI polypeptide. In some cases, a Cas9 heterodimer comprises: A) a first fusion polypeptide comprising: a) a first, circular permuted, polypeptide that comprises: i) a RuvCI polypeptide; ii) a RuvCII polypeptide; iii) an HNH polypeptide; iv) a RuvCIII polypeptide; and v) a PAM-interacting polypeptide; and b) a first fusion partner, where the first fusion partner is an ABI polypeptide; and B) a second fusion polypeptide comprising: a) a second polypeptide that comprises an alpha-helical recognition region; and b) a second fusion partner, where the second fusion partner is a PYL polypeptide.

[0426] In some cases, a Cas9 heterodimer comprises: A) a first fusion polypeptide comprising: a) a first, circular permuted, polypeptide that comprises: i) a RuvCI polypeptide; ii) a RuvCII polypeptide; iii) an HNH polypeptide; iv) a RuvCIII polypeptide; and v) a PAM-interacting polypeptide; and b) a first fusion partner, where the first fusion partner is a Cry2 polypeptide; and B) a second fusion polypeptide comprising: a) a second polypeptide that comprises an alpha-helical recognition region; and b) a second fusion partner, where the second fusion partner is a CIB1 polypeptide. In some cases, a Cas9 heterodimer comprises: A) a first fusion polypeptide comprising: a) a first, circular permuted, polypeptide that comprises: i) a RuvCI polypeptide; ii) a RuvCII polypeptide; iii) an HNH polypeptide; iv) a RuvCIII polypeptide; and v) a PAM-interacting polypeptide; and b) a first fusion partner, where the first fusion partner is a CIB1 polypeptide; and B) a second fusion polypeptide comprising: a) a second polypeptide that comprises an alpha-helical recognition region; and b) a second fusion partner, where the second fusion partner is a Cry2 polypeptide.

[0427] In some cases, a Cas9 heterodimer comprises: A) a first fusion polypeptide comprising: a) a first, circular permuted, polypeptide that comprises: i) a RuvCI polypeptide; ii) a RuvCII polypeptide; iii) an HNH polypeptide; iv) a RuvCIII polypeptide; and v) a PAM-interacting polypeptide; and b) a first fusion partner, where the first fusion partner is a GAI polypeptide; and B) a second fusion polypeptide comprising: a) a second polypeptide that comprises an alpha-helical recognition region; and b) a second fusion partner, where the second fusion partner is a GID1 polypeptide. In some cases, a Cas9 heterodimer comprises: A) a first fusion polypeptide comprising: a) a first, circular permuted, polypeptide that comprises: i) a RuvCI polypeptide; ii) a RuvCII polypeptide; iii) an HNH polypeptide; iv) a RuvCIII polypeptide; and v) a PAM-interacting polypeptide; and b) a first fusion partner, where the first fusion partner is a GID1 polypeptide; and B) a second fusion polypeptide comprising: a) a second polypeptide that comprises an alpha-helical recognition region; and b) a second fusion partner, where the second fusion partner is a GAI polypeptide.

### Cas9 Guide RNA

[0428] A nucleic acid molecule that binds to a Cas9 protein and targets the Cas9 protein (e.g., a subject variant Cas9 protein) to a specific location within the target nucleic acid is referred to herein as a “guide nucleic acid” or “Cas9 guide RNA.” In some cases, a guide nucleic acid is RNA, and in some cases, can be a hybrid nucleic acid that includes both deoxyribonucleotides and ribonucleotides. For the sake of simplicity, as used herein, the terms that include the phrase “guide RNA” (e.g., the terms “Cas9 guide RNA”, “truncated guide RNA”, “guide RNA”, and such) are meant to encompass guide RNAs and guide nucleic acids that include components/regions/sections other than RNA (e.g., deoxyribonucleotide regions; modified nucleotides such as base modifications, sugar modifications, nucleotide linkage modifications, and the like; etc.). Also, to distinguish a guide RNA that interacts and guides a Cas9 protein from other guide RNAs in the art, the term “Cas9 guide RNA” is herein used to refer to a guide RNA (and to modified guide RNAs having deoxyribonucleotides and/or other modifications) that interacts with a Cas9 protein and targets the protein to a particular location (the target sequence) within a target nucleic acid.

[0429] A subject Cas9 guide RNA includes two segments, a first segment (referred to herein as a “targeting segment”); and a second segment (referred to herein as a “protein-binding segment”). By “segment” it is meant a segment/section/region of a molecule, e.g., a contiguous stretch of nucleotides in a nucleic acid molecule. A segment can also mean a region/section of a complex such that a segment may comprise regions of more than one molecule.

[0430] The first segment (targeting segment) of a Cas9 guide RNA comprises a nucleotide sequence that is complementary to (and therefore hybridizes with) a specific sequence (a target site) within a target nucleic acid (e.g., a target ssRNA, a target ssDNA, the complementary strand of a double stranded target DNA, etc.). The protein-binding segment (or “protein-binding sequence”) interacts with a Cas9 polypeptide. The protein-binding segment of a subject Cas9 guide RNA includes two complementary stretches of nucleotides that hybridize to one another to form a double stranded RNA duplex (dsRNA duplex). Site-specific binding and/or cleavage of the target nucleic acid can occur at locations determined by base-pairing complementarity between the Cas9 guide RNA and the target nucleic acid.

[0431] A subject Cas9 guide RNA and a subject Cas9 protein form a complex (e.g., bind via non-covalent interactions). The Cas9 guide RNA provides target specificity to the complex by including a targeting segment, which includes a nucleotide sequence that is complementary to a sequence of a target nucleic acid. The Cas9 protein of the complex provides the site-specific activity (e.g., cleavage activity or an activity provided by the Cas9 protein when the Cas9 protein is a chimeric protein, i.e., has a fusion partner). In other words, the Cas9 protein is guided to a target nucleic acid sequence (e.g. a target sequence in a chromosomal nucleic acid, e.g., a chromosome; a target sequence in an extrachromosomal nucleic acid, e.g. an episomal nucleic acid, a minicircle, an ssRNA, an ssDNA, etc.; a target sequence in a mitochondrial nucleic acid; a target sequence in a chloroplast nucleic acid; a target sequence in a plasmid; a target sequence in a viral nucleic acid; etc.) by virtue of its association with the Cas9 guide RNA.

[0432] The targeting sequence (the targeting segment) of a Cas9 guide RNA can be modified so that the Cas9 guide RNA can target a Cas9 protein to any desired sequence of any desired target nucleic acid, with the exception (e.g., as described herein) that the PAM sequence can be taken into account. Thus, for example, a Cas9 guide RNA can have a targeting segment with a sequence that has complementarity with (e.g., can hybridize to) a sequence in a nucleic acid in a eukaryotic cell, e.g., a viral nucleic acid, a eukaryotic nucleic acid (e.g., a eukaryotic chromosome, chromosomal sequence, a eukaryotic RNA, etc.), and the like.

[0433] In some embodiments, a subject Cas9 guide RNA comprises two separate nucleic acid molecules: an “activator” and a “targeter” and is referred to herein as a “dual Cas9 guide RNA”, a “double-molecule Cas9 guide RNA”, or a “two-molecule Cas9 guide RNA” a “dual guide RNA”, or a “dgRNA.” In some embodiments, the activator and targeter are covalently linked to one another (e.g., via intervening nucleotides) and the guide RNA is referred to as a “single guide RNA”, a “Cas9 single guide RNA”, a “single-molecule Cas9 guide RNA,” or a “one-molecule Cas9 guide RNA”, or simply “sgRNA.”

[0434] An example dual Cas9 guide RNA comprises a crRNA-like (“CRISPR RNA”/“targeter”/“crRNA”/“crRNA repeat”) molecule and a corresponding tracrRNA-like (“trans-acting CRISPR RNA”/“activator”/“tracrRNA”) molecule. A crRNA-like molecule (targeter) comprises both the targeting segment (single stranded) of the guide nucleic acid and a stretch (“duplex-forming segment”) of nucleotides that forms one half of the dsRNA duplex of the protein-binding segment of the Cas9 guide RNA. A corresponding tracrRNA-like molecule (activator/tracrRNA) comprises a stretch of nucleotides (duplex-forming segment) that forms the other half of the dsRNA duplex of the protein-binding segment of the guide nucleic acid. In other words, a stretch of nucleotides of a crRNA-like molecule are complementary to and hybridize with a stretch of nucleotides of a tracrRNA-like molecule to form the dsRNA duplex of the protein-binding domain of the Cas9 guide RNA. As such, each targeter molecule can be said to have a corresponding activator molecule (which has a region that hybridizes with the targeter). The targeter molecule additionally provides the targeting segment. Thus, a targeter and an activator molecule (as a corresponding pair) hybridize to form a Cas9 guide RNA. The exact sequence of a given crRNA or tracrRNA molecule is characteristic of the species in which the RNA molecules are found. A subject dual Cas9 guide RNA can include any corresponding activator and targeter pair.

[0435] The term “activator” is used herein to mean a tracrRNA-like molecule (tracrRNA: “trans-acting CRISPR RNA”) of a Cas9 dual guide RNA (and therefore of a Cas9 single guide RNA when the “activator” and the “targeter” are linked together by, e.g., intervening nucleotides). Thus, for example, a Cas9 guide RNA (dgRNA or sgRNA) comprises an activator sequence (e.g., a tracrRNA sequence). A tracr molecule (a tracrRNA) is a naturally existing molecule that hybridizes with a CRISPR RNA molecule (a crRNA) to form a Cas9 dual guide RNA. The term “activator” is used herein to encompass naturally existing tracrRNAs, but also to encompass tracrRNAs with modifications (e.g., truncations, sequence variations, base modifications, backbone modifications, linkage modifications, etc.) where the activator retains at least one function of a tracrRNA (e.g., contributes to the dsRNA duplex to which Cas9 binds). An activator can be referred to as having a tracr sequence (tracrRNA sequence) and in some cases is a tracrRNA, but the term “activator” is not limited to naturally existing tracrRNAs.

[0436] The term “targeter” is used herein to refer to a crRNA-like molecule (crRNA: “CRISPR RNA”) of a Cas9 dual guide RNA (and therefore of a Cas9 single guide RNA when the “activator” and the “targeter” are linked together, e.g., by intervening nucleotides). Thus, for example, a Cas9 guide RNA (dgRNA or sgRNA) comprises a targeting segment (which includes nucleotides that hybridize with (are complementary to) a target nucleic acid, and a duplex-forming segment (e.g., a duplex forming segment of a crRNA, which can also be referred to as a crRNA repeat). Because the sequence of a targeting segment (the segment that hybridizes with a target sequence of a target nucleic acid) of a targeter is modified by a user to hybridize with a desired target nucleic acid, the sequence of a targeter will often be a non-naturally occurring sequence. However, the duplex-forming segment of a targeter (described in more detail below), which hybridizes with the duplex-forming segment of an activator, can include a naturally existing sequence (e.g., can include the sequence of a duplex-forming segment of a naturally existing crRNA, which can also be referred to as a crRNA repeat). Thus, the term targeter is used herein to distinguish from naturally occurring crRNAs, despite the fact that part of a targeter (e.g., the duplex-forming segment) often includes a naturally occurring sequence from a crRNA. However, the term “targeter” encompasses naturally occurring crRNAs.

[0437] The term “duplex-forming segment” is used herein to refer to the stretch of nucleotides of an activator or a targeter that contributes to the formation of the dsRNA duplex by hybridizing to a stretch of nucleotides of a corresponding activator or targeter. In other words, an activator comprises a duplex-forming segment that is complementary to the duplex-forming segment of the corresponding targeter. As such, an activator comprises a duplex-forming segment while a targeter comprises both a duplex-forming segment and the targeting segment of the Cas9 guide RNA (sgRNA or dgRNA). A subject Cas9 single guide RNA comprises an “activator” and a “targeter” where the “activator” and the “targeter” are linked (e.g., covalently linked by intervening nucleotides). A subject Cas9 dual guide RNA comprises an “activator” and a “targeter” where the “activator” and the “targeter” are not linked (e.g., by intervening nucleotides).

[0438] A Cas9 guide RNA can also be said to include 3 parts: (i) a targeting sequence (a nucleotide sequence that hybridizes with a sequence of the target nucleic acid); (ii) an activator sequence (as described above)(in some cases, referred to as a tracr sequence); and (iii) a sequence that hybridizes to at least a portion of the activator sequence to form a double stranded duplex. For example, a targeter has (i) and (iii); while an activator has (ii).

[0439] A Cas9 guide RNA (e.g. a dual guide RNA or a single guide RNA) can be comprised of any corresponding activator and targeter pair. Non-limiting examples of nucleotide sequences that can be included in a Cas9 guide RNA (dgRNA or sgRNA) include sequences set forth in SEQ ID NOs:431-679 and 1535-1544, or complements thereof. For example, in some cases, sequences from SEQ ID NOs: 431-562 and 1535-1544 (which are from tracrRNAs) or complements thereof, can pair with sequences from SEQ ID NOs: 563-679 (which are from crRNAs), or complements thereof, to form a dsRNA duplex of a protein binding segment.

[0440] In some cases, the duplex forming segments can be swapped between the activator and the targeter. In other words, in some cases, the targeter includes a sequence of nucleotides from a duplex forming segment of a tracrRNA (which sequence would normally be part of an activator) while the activator includes a sequence of nucleotides from a duplex forming segment of a crRNA (which sequence would normally be part of a targeter).

[0441] As noted above, a targeter comprises both the targeting segment (single stranded) of the Cas9 guide RNA and a stretch (“duplex-forming segment”) of nucleotides that forms one half of the dsRNA duplex of the protein-binding segment of the Cas9 guide RNA. A corresponding tracrRNA-like molecule (activator) comprises a stretch of nucleotides (a duplex-forming segment) that forms the other half of the dsRNA duplex of the protein-binding segment of the Cas9 guide RNA. In other words, a stretch of nucleotides of the targeter is complementary to and hybridizes with a stretch of nucleotides of the activator to form the dsRNA duplex of the protein-binding segment of a Cas9 guide RNA. As such, each targeter can be said to have a corresponding activator (which has a region that hybridizes with the targeter). The targeter molecule additionally provides the targeting segment. Thus, a targeter and an activator (as a corresponding pair) hybridize to form a Cas9 guide RNA. The particular sequence of a given naturally existing crRNA or tracrRNA molecule is characteristic of the species in which the RNA molecules are found. Examples of suitable activator and targeter sequences include, but are not limited to, those set forth in SEQ ID NOs: 431-679 and 1535-1544. A subject Cas9 guide RNA (dgRNA or sgRNA) can include any corresponding activator and targeter sequence pair.

### Targeting Segment of a Cas9 Guide RNA

[0442] The first segment of a subject guide nucleic acid includes a nucleotide sequence that is complementary to a sequence (a target site) in a target nucleic acid. In other words, the targeting segment of a subject guide nucleic acid can interact with a target nucleic acid (e.g., a single stranded RNA (ssRNA) and/or a single stranded DNA (ssDNA)) in a sequence-specific manner via hybridization (i.e., base pairing). As such, the nucleotide sequence of the targeting segment may vary (depending on the target) and can determine the location within the target nucleic acid that the Cas9 guide RNA and the target nucleic acid will interact. The targeting segment of a Cas9 guide RNA can be modified (e.g., by genetic engineering)/designed to hybridize to any desired sequence (target site) within a target nucleic acid (e.g., a eukaryotic target nucleic acid).

[0443] The targeting segment can have a length of 7 or more nucleotides (nt) (e.g., 8 or more, 9 or more, 10 or more, 12 or more, 15 or more, 20 or more, 25 or more, 30 or more, or 40 or more nucleotides). In some cases, the targeting segment can have a length of from 7 to 100 nucleotides (nt) (e.g., from 7 to 80 nt, from 7 to 60 nt, from 7 to 40 nt, from 7 to 30 nt, from 7 to 25 nt, from 7 to 22 nt, from 7 to 20 nt, from 7 to 18 nt, from 8 to 80 nt, from 8 to 60 nt, from 8 to 40 nt, from 8 to 30 nt, from 8 to 25 nt, from 8 to 22 nt, from 8 to 20 nt, from 8 to 18 nt, from 10 to 100 nt, from 10 to 80 nt, from 10 to 60 nt, from 10 to 40 nt, from 10 to 30 nt, from 10 to 25 nt, from 10 to 22 nt, from 10 to 20 nt, from 10 to 18 nt, from 12 to 100 nt, from 12 to 80 nt, from 12 to 60 nt, from 12 to 40 nt, from 12 to 30 nt, from 12 to 25 nt, from 12 to 22 nt, from 12 to 20 nt, from 12 to 18 nt, from 14 to 100 nt, from 14 to 80 nt, from 14 to 60 nt, from 14 to 40 nt, from 14 to 30 nt, from 14 to 25 nt, from 14 to 22 nt, from 14 to 20 nt, from 14 to 18 nt, from 16 to 100 nt, from 16 to 80 nt, from 16 to 60 nt, from 16 to 40 nt, from 16 to 30 nt, from 16 to 25 nt, from 16 to 22 nt, from 16 to 20 nt, from 16 to 18 nt, from 18 to 100 nt, from 18 to 80 nt, from 18 to 60 nt, from 18 to 40 nt, from 18 to 30 nt, from 18 to 25 nt, from 18 to 22 nt, or from 18 to 20 nt).

[0444] The nucleotide sequence (the targeting sequence) of the targeting segment that is complementary to a nucleotide sequence (target site) of the target nucleic acid can have a length of 10 nt or more. For example, the targeting sequence of the targeting segment that is complementary to a target site of the target nucleic acid can have a length of 12 nt or more, 15 nt or more, 18 nt or more, 19 nt or more, or 20 nt or more. In some cases, the nucleotide sequence (the targeting sequence) of the targeting segment that is complementary to a nucleotide sequence (target site) of the target nucleic acid has a length of 12 nt or more. In some cases, the nucleotide sequence (the targeting sequence) of the targeting segment that is complementary to a nucleotide sequence (target site) of the target nucleic acid has a length of 18 nt or more.

[0445] For example, the targeting sequence of the targeting segment that is complementary to a target sequence of the target nucleic acid can have a length of from 10 to 100 nucleotides (nt) (e.g., from 10 to 90 nt, from 10 to 75 nt, from 10 to 60 nt, from 10 to 50 nt, from 10 to 35 nt, from 10 to 30 nt, from 10 to 25 nt, from 10 to 22 nt, from 10 to 20 nt, from 12 to 100 nt, from 12 to 90 nt, from 12 to 75 nt, from 12 to 60 nt, from 12 to 50 nt, from 12 to 35 nt, from 12 to 30 nt, from 12 to 25 nt, from 12 to 22 nt, from 12 to 20 nt, from 15 to 100 nt, from 15 to 90 nt, from 15 to 75 nt, from 15 to 60 nt, from 15 to 50 nt, from 15 to 35 nt, from 15 to 30 nt, from 15 to 25 nt, from 15 to 22 nt, from 15 to 20 nt, from 17 to 100 nt, from 17 to 90 nt, from 17 to 75 nt, from 17 to 60 nt, from 17 to 50 nt, from 17 to 35 nt, from 17 to 30 nt, from 17 to 25 nt, from 17 to 22 nt, from 17 to 20 nt, from 18 to 100 nt, from 18 to 90 nt, from 18 to 75 nt, from 18 to 60 nt, from 18 to 50 nt, from 18 to 35 nt, from 18 to 30 nt, from 18 to 25 nt, from 18 to 22 nt, or from 18 to 20 nt). In some cases, the targeting sequence of the targeting segment that is complementary to a target sequence of the target nucleic acid has a length of from 15 nt to 30 nt. In some cases, the targeting sequence of the targeting segment that is complementary to a target sequence of the target nucleic acid has a length of from 15 nt to 25 nt. In some cases, the targeting sequence of the targeting segment that is complementary to a target sequence of the target nucleic acid has a length of from 18 nt to 30 nt. In some cases, the targeting sequence of the targeting segment that is complementary to a target sequence of the target nucleic acid has a length of from 18 nt to 25 nt. In some cases, the targeting sequence of the targeting segment that is complementary to a target sequence of the target nucleic acid has a length of from 18 nt to 22 nt. In some cases, the targeting sequence of the targeting segment that is complementary to a target site of the target nucleic acid is 20 nucleotides in length. In some cases, the targeting sequence of the targeting segment that is complementary to a target site of the target nucleic acid is 19 nucleotides in length.

[0446] The percent complementarity between the targeting sequence of the targeting segment and the target site of the target nucleic acid can be 60% or more (e.g., 65% or more, 70% or more, 75% or more, 80% or more, 85% or more, 90% or more, 95% or more, 97% or more, 98% or more, 99% or more, or 100%). In some cases, the percent complementarity between the targeting sequence of the targeting segment and the target site of the target nucleic acid is 100% over the seven contiguous 5′-most nucleotides of the target site of the target nucleic acid. In some cases, the percent complementarity between the targeting sequence of the targeting segment and the target site of the target nucleic acid is 60% or more over about 20 contiguous nucleotides. In some cases, the percent complementarity between the targeting sequence of the targeting segment and the target site of the target nucleic acid is 100% over the fourteen contiguous 5′-most nucleotides of the target site of the target nucleic acid and as low as 0% or more over the remainder. In such a case, the targeting sequence can be considered to be 14 nucleotides in length. In some cases, the percent complementarity between the targeting sequence of the targeting segment and the target site of the target nucleic acid is 100% over the seven contiguous 5′-most nucleotides of the target site of the target nucleic acid and as low as 0% or more over the remainder. In such a case, the targeting sequence can be considered to be 20 nucleotides in length.

[0447] In some cases, the percent complementarity between the targeting sequence of the targeting segment and the target site of the target nucleic acid is 100% over the 7 contiguous 5′-most nucleotides of the target site of the target nucleic acid (which can be complementary to the 3′-most nucleotides of the targeting sequence of the Cas9 guide RNA). In some cases, the percent complementarity between the targeting sequence of the targeting segment and the target site of the target nucleic acid is 100% over the 8 contiguous 5′-most nucleotides of the target site of the target nucleic acid (which can be complementary to the 3′-most nucleotides of the targeting sequence of the Cas9 guide RNA). In some cases, the percent complementarity between the targeting sequence of the targeting segment and the target site of the target nucleic acid is 100% over the 9 contiguous 5′-most nucleotides of the target site of the target nucleic acid (which can be complementary to the 3′-most nucleotides of the targeting sequence of the Cas9 guide RNA). In some cases, the percent complementarity between the targeting sequence of the targeting segment and the target site of the target nucleic acid is 100% over the 10 contiguous 5′-most nucleotides of the target site of the target nucleic acid (which can be complementary to the 3′-most nucleotides of the targeting sequence of the Cas9 guide RNA). In some cases, the percent complementarity between the targeting sequence of the targeting segment and the target site of the target nucleic acid is 60% or more (e.g., e.g., 65% or more, 70% or more, 75% or more, 80% or more, 85% or more, 90% or more, 95% or more, 97% or more, 98% or more, 99% or more, or 100%) over about 20 contiguous nucleotides.

[0448] In some cases, the percent complementarity between the targeting sequence of the targeting segment and the target site of the target nucleic acid is 100% over the 7 contiguous 5′-most nucleotides of the target site of the target nucleic acid and as low as 0% or more over the remainder. In such a case, the targeting sequence can be considered to be 7 nucleotides in length. In some cases, the percent complementarity between the targeting sequence of the targeting segment and the target site of the target nucleic acid is 100% over the 8 contiguous 5′-most nucleotides of the target site of the target nucleic acid and as low as 0% or more over the remainder. In such a case, the targeting sequence can be considered to be 8 nucleotides in length. In some cases, the percent complementarity between the targeting sequence of the targeting segment and the target site of the target nucleic acid is 100% over the 9 contiguous 5′-most nucleotides of the target site of the target nucleic acid and as low as 0% or more over the remainder. In such a case, the targeting sequence can be considered to be 9 nucleotides in length. In some cases, the percent complementarity between the targeting sequence of the targeting segment and the target site of the target nucleic acid is 100% over the 10 contiguous 5′-most nucleotides of the target site of the target nucleic acid and as low as 0% or more over the remainder. In such a case, the targeting sequence can be considered to be 10 nucleotides in length. In some cases, the percent complementarity between the targeting sequence of the targeting segment and the target site of the target nucleic acid is 100% over the 11 contiguous 5′-most nucleotides of the target site of the target nucleic acid and as low as 0% or more over the remainder. In such a case, the targeting sequence can be considered to be 11 nucleotides in length. In some cases, the percent complementarity between the targeting sequence of the targeting segment and the target site of the target nucleic acid is 100% over the 12 contiguous 5′-most nucleotides of the target site of the target nucleic acid and as low as 0% or more over the remainder. In such a case, the targeting sequence can be considered to be 12 nucleotides in length. In some cases, the percent complementarity between the targeting sequence of the targeting segment and the target site of the target nucleic acid is 100% over the 13 contiguous 5′-most nucleotides of the target site of the target nucleic acid and as low as 0% or more over the remainder. In such a case, the targeting sequence can be considered to be 13 nucleotides in length. In some cases, the percent complementarity between the targeting sequence of the targeting segment and the target site of the target nucleic acid is 100% over the 14 contiguous 5′-most nucleotides of the target site of the target nucleic acid and as low as 0% or more over the remainder. In such a case, the targeting sequence can be considered to be 14 nucleotides in length.

### Second Segment: Protein-Binding Segment

[0449] The protein-binding segment of a subject Cas9 guide RNA interacts with a Cas9 protein. The Cas9 guide RNA guides the bound Cas9 protein to a specific nucleotide sequence within target nucleic acid via the targeting segment. The protein-binding segment of a Cas9 guide RNA comprises two stretches of nucleotides that are complementary to one another and hybridize to form a double stranded RNA duplex (dsRNA duplex). Thus, the protein-binding segment includes a dsRNA duplex. In some cases, the protein-binding segment also includes stem loop 1 (the “nexus”) of a Cas9 guide RNA. For example, in some cases, the activator of a Cas9 guide RNA (dgRNA or sgRNA) includes (i) a duplex forming segment that contributes to the dsRNA duplex of the protein-binding segment; and (ii) nucleotides 3′ of the duplex forming segment, e.g., that form stem loop 1 (the “nexus”). For example, in some cases, the protein-binding segment includes stem loop 1 (the “nexus”) of a Cas9 guide RNA. In some cases, the protein-binding segment includes 5 or more nucleotides (nt) (e.g., 6 or more, 7 or more, 8 or more, 9 or more, 10 or more, 11 or more, 12 or more, 15 or more, 20 or more, 30 or more, 40 or more, 50 or more, 60 or more, 70 or more, 75 or more, or 80 or more nt) 3′ of the dsRNA duplex (where 3′ is relative to the duplex-forming segment of the activator sequence).

[0450] The dsRNA duplex of the guide RNA (sgRNA or dgRNA) that forms between the activator and targeter is sometimes referred to herein as the “stem loop”. In addition, the activator (activator RNA, tracrRNA) of many naturally existing Cas9 guide RNAs (e.g., S. pyogenes guide RNAs) has 3 stem loops (3 hairpins) that are 3′ of the duplex-forming segment of the activator. The closest stem loop to the duplex-forming segment of the activator (3′ of the duplex forming segment) is called “stem loop 1” (and is also referred to herein as the “nexus”); the next stem loop is called “stem loop 2” (and is also referred to herein as the “hairpin 1”); and the next stem loop is called “stem loop 3” (and is also referred to herein as the “hairpin 2”).

[0451] The term “truncated guide RNA”, as used herein, refers to a Cas9 guide RNA (single guide or dual guide) that has the nexus (“stem loop 1”), but is missing one or both of stem loops 2 and 3. Thus, a “truncated guide RNA” is truncated from the 3′ end of the activator and can have: (i) stem loop 1 only; (ii) stem loop 1 plus stem loop 2; or (iii) stem loop 1 plus stem loop 3. In some cases, a guide RNA (e.g., some naturally existing guide RNAs) have only one stem loop 3′ of the nexus (“stem loop 1”) and thus for purposes herein, such guide RNAs are referred to herein as having a nexus (“stem loop 1”) and a “stem loop 2/3” (or “hairpin 1/2”). For more information regarding Cas9 guide RNAs, see Briner et al., Mol Cell. 2014 Oct. 23; 56(2):333-9, which is hereby incorporated by reference in its entirety.

[0452] The term “truncated guide RNA”, as used herein, refers to a Cas9 guide RNA (single guide or dual guide) that does not include one or both of: stem loop 2 and stem loop 3. In some cases, a Cas9 guide RNA (sgRNA or dgRNA) (a truncated Cas9 guide RNA) has stem loop 1, but does not have stem loop 2 and does not have stem loop 3. In some cases, a Cas9 guide RNA (sgRNA or dgRNA) (a truncated Cas9 guide RNA) has stem loop 1 and stem loop 2, but does not have stem loop 3. In some cases, a Cas9 guide RNA (sgRNA or dgRNA) (a truncated Cas9 guide RNA) has stem loop 1 and stem loop 3, but does not have stem loop 2. For example, in some cases, a Cas9 guide RNA (sgRNA or dgRNA) (a truncated Cas9 guide RNA) has stem loop 1, but does not have at least one of: stem loop 2 and stem loop 3. In some cases, a Cas9 guide RNA (sgRNA or dgRNA) (e.g., a full length Cas9 guide RNA) has stem loops 1, 2, and 3.

[0453] Thus, in some cases, an activator (of a Cas9 guide RNA) has stem loop 1, but does not have stem loop 2 and does not have stem loop 3. In some cases, an activator (of a Cas9 guide RNA) has stem loop 1 and stem loop 2, but does not have stem loop 3. In some cases, an activator (of a Cas9 guide RNA) has stem loop 1 and stem loop 3, but does not have stem loop 2. In some cases, an activator (of a Cas9 guide RNA) has stem loops 1, 2, and 3. For example, in some cases, an activator (of a Cas9 guide RNA) has stem loop 1, but does not have at least one of: stem loop 2 and stem loop 3.

[0454] In some cases, the activator (e.g., tracr sequence) of a Cas9 guide RNA (dgRNA or sgRNA) includes (i) a duplex forming segment that contributes to the dsRNA duplex of the protein-binding segment; and (ii) nucleotides 3′ of the duplex forming segment (and therefore the Cas9 guide RNA includes (ii)). In some cases, the additional nucleotides 3′ of the duplex forming segment form stem loop 1. In some cases, the activator (e.g., tracr sequence) of a Cas9 guide RNA (dgRNA or sgRNA) includes (i) a duplex forming segment that contributes to the dsRNA duplex of the protein-binding segment; and (ii) 5 or more nucleotides (e.g., 6 or more, 7 or more, 8 or more, 9 or more, 10 or more, 11 or more, 12 or more, 13 or more, 14 or more, 15 or more, 20 or more, 25 or more, 30 or more, 35 or more, 40 or more, 45 or more, 50 or more, 60 or more, 70 or more, or 75 or more nucleotides) 3′ of the duplex forming segment (and therefore the Cas9 guide RNA includes (ii)). In some cases, the activator of a Cas9 guide RNA (dgRNA or sgRNA) includes (i) a duplex forming segment that contributes to the dsRNA duplex of the protein-binding segment; and (ii) 5 or more nucleotides (e.g., 6 or more, 7 or more, 8 or more, 9 or more, 10 or more, 11 or more, 12 or more, 13 or more, 14 or more, 15 or more, 20 or more, 25 or more, 30 or more, 35 or more, 40 or more, 45 or more, 50 or more, 60 or more, 70 or more, or 75 or more nucleotides) 3′ of the duplex forming segment (and therefore the Cas9 guide RNA includes (ii)).

[0455] In some cases, the activator (e.g., tracr sequence) of a Cas9 guide RNA (dgRNA or sgRNA) includes (i) a duplex forming segment that contributes to the dsRNA duplex of the protein-binding segment; and (ii) a stretch of nucleotides (e.g., referred to herein as a 3′ tail) 3′ of the duplex forming segment (and therefore the Cas9 guide RNA includes (ii)). In some cases, the stretch of nucleotides 3′ of the duplex forming segment has a length in a range of from 5 to 200 nucleotides (nt) (e.g., from 5 to 150 nt, from 5 to 130 nt, from 5 to 120 nt, from 5 to 100 nt, from 5 to 80 nt, from 10 to 200 nt, from 10 to 150 nt, from 10 to 130 nt, from 10 to 120 nt, from 10 to 100 nt, from 10 to 80 nt, from 12 to 200 nt, from 12 to 150 nt, from 12 to 130 nt, from 12 to 120 nt, from 12 to 100 nt, from 12 to 80 nt, from 15 to 200 nt, from 15 to 150 nt, from 15 to 130 nt, from 15 to 120 nt, from 15 to 100 nt, from 15 to 80 nt, from 20 to 200 nt, from 20 to 150 nt, from 20 to 130 nt, from 20 to 120 nt, from 20 to 100 nt, from 20 to 80 nt, from 30 to 200 nt, from 30 to 150 nt, from 30 to 130 nt, from 30 to 120 nt, from 30 to 100 nt, or from 30 to 80 nt).

[0456] In some embodiments, the duplex-forming segment of the activator (e.g., of a Cas9 dual guide RNA or a Cas9 single guide RNA) is 60% or more identical to one of the activator (tracrRNA) molecules set forth in SEQ ID NOs:431-562 and 1535-1544, or a complement thereof, over a stretch of 8 or more contiguous nucleotides (e.g., 8 or more contiguous nucleotides, 10 or more contiguous nucleotides, 12 or more contiguous nucleotides, 15 or more contiguous nucleotides, or 20 or more contiguous nucleotides). For example, the duplex-forming segment of the activator (or the DNA encoding the duplex-forming segment of the activator) (e.g., of a Cas9 dual guide RNA or a Cas9 single guide RNA) can be 65% or more identical to one of the tracrRNA sequences set forth in SEQ ID NOs:431-562 and 1535-1544, or a complement thereof, over a stretch of 8 or more contiguous nucleotides (e.g., 8 or more contiguous nucleotides, 10 or more contiguous nucleotides, 12 or more contiguous nucleotides, 15 or more contiguous nucleotides, or 20 or more contiguous nucleotides). The duplex-forming segment of the activator (or the DNA encoding the duplex-forming segment of the activator) (e.g., of a Cas9 dual guide RNA or a Cas9 single guide RNA) can be 70% or more identical to one of the tracrRNA sequences set forth in SEQ ID NOs:431-562 and 1535-1544, or a complement thereof, over a stretch of 8 or more contiguous nucleotides (e.g., 8 or more contiguous nucleotides, 10 or more contiguous nucleotides, 12 or more contiguous nucleotides, 15 or more contiguous nucleotides, or 20 or more contiguous nucleotides). The duplex-forming segment of the activator (or the DNA encoding the duplex-forming segment of the activator) (e.g., of a Cas9 dual guide RNA or a Cas9 single guide RNA) can be 75% or more identical to one of the tracrRNA sequences set forth in SEQ ID NOs:431-562 and 1535-1544, or a complement thereof, over a stretch of 8 or more contiguous nucleotides (e.g., 8 or more contiguous nucleotides, 10 or more contiguous nucleotides, 12 or more contiguous nucleotides, 15 or more contiguous nucleotides, or 20 or more contiguous nucleotides). The duplex-forming segment of the activator (or the DNA encoding the duplex-forming segment of the activator) (e.g., of a Cas9 dual guide RNA or a Cas9 single guide RNA) can be 80% or more identical to one of the tracrRNA sequences set forth in SEQ ID NOs:431-562 and 1535-1544, or a complement thereof, over a stretch of 8 or more contiguous nucleotides (e.g., 8 or more contiguous nucleotides, 10 or more contiguous nucleotides, 12 or more contiguous nucleotides, 15 or more contiguous nucleotides, or 20 or more contiguous nucleotides). The duplex-forming segment of the activator (or the DNA encoding the duplex-forming segment of the activator) (e.g., of a Cas9 dual guide RNA or a Cas9 single guide RNA) can be 85% or more identical to one of the tracrRNA sequences set forth in SEQ ID NOs:431-562 and 1535-1544, or a complement thereof, over a stretch of 8 or more contiguous nucleotides (e.g., 8 or more contiguous nucleotides, 10 or more contiguous nucleotides, 12 or more contiguous nucleotides, 15 or more contiguous nucleotides, or 20 or more contiguous nucleotides). The duplex-forming segment of the activator (or the DNA encoding the duplex-forming segment of the activator) (e.g., of a Cas9 dual guide RNA or a Cas9 single guide RNA) can be 90% or more identical to one of the tracrRNA sequences set forth in SEQ ID NOs:431-562 and 1535-1544, or a complement thereof, over a stretch of 8 or more contiguous nucleotides (e.g., 8 or more contiguous nucleotides, 10 or more contiguous nucleotides, 12 or more contiguous nucleotides, 15 or more contiguous nucleotides, or 20 or more contiguous nucleotides). The duplex-forming segment of the activator (or the DNA encoding the duplex-forming segment of the activator) (e.g., of a Cas9 dual guide RNA or a Cas9 single guide RNA) can be 95% or more identical to one of the tracrRNA sequences set forth in SEQ ID NOs:431-562 and 1535-1544, or a complement thereof, over a stretch of 8 or more contiguous nucleotides (e.g., 8 or more contiguous nucleotides, 10 or more contiguous nucleotides, 12 or more contiguous nucleotides, 15 or more contiguous nucleotides, or 20 or more contiguous nucleotides). The duplex-forming segment of the activator (or the DNA encoding the duplex-forming segment of the activator) (e.g., of a Cas9 dual guide RNA or a Cas9 single guide RNA) can be 98% or more identical to one of the tracrRNA sequences set forth in SEQ ID NOs:431-562 and 1535-1544, or a complement thereof, over a stretch of 8 or more contiguous nucleotides (e.g., 8 or more contiguous nucleotides, 10 or more contiguous nucleotides, 12 or more contiguous nucleotides, 15 or more contiguous nucleotides, or 20 or more contiguous nucleotides). The duplex-forming segment of the activator (or the DNA encoding the duplex-forming segment of the activator) (e.g., of a Cas9 dual guide RNA or a Cas9 single guide RNA) can be 99% or more identical to one of the tracrRNA sequences set forth in SEQ ID NOs:431-562 and 1535-1544, or a complement thereof, over a stretch of 8 or more contiguous nucleotides (e.g., 8 or more contiguous nucleotides, 10 or more contiguous nucleotides, 12 or more contiguous nucleotides, 15 or more contiguous nucleotides, or 20 or more contiguous nucleotides). The duplex-forming segment of the activator (or the DNA encoding the duplex-forming segment of the activator) (e.g., of a Cas9 dual guide RNA or a Cas9 single guide RNA) can be 100% identical to one of the tracrRNA sequences set forth in SEQ ID NOs:431-562 and 1535-1544, or a complement thereof, over a stretch of 8 or more contiguous nucleotides (e.g., 8 or more contiguous nucleotides, 10 or more contiguous nucleotides, 12 or more contiguous nucleotides, 15 or more contiguous nucleotides, or 20 or more contiguous nucleotides).

[0457] In some embodiments, the duplex-forming segment of the targeter (or the DNA encoding the duplex-forming segment of the targeter) (e.g., of a Cas9 dual guide RNA or a Cas9 single guide RNA) is 60% or more identical to one of the targeter (crRNA) sequences set forth in SEQ ID NOs:563-679, or a complement thereof, over a stretch of 8 or more contiguous nucleotides (e.g., 8 or more contiguous nucleotides, 10 or more contiguous nucleotides, 12 or more contiguous nucleotides, 15 or more contiguous nucleotides, or 20 or more contiguous nucleotides). For example, the duplex-forming segment of the targeter (or the DNA encoding the duplex-forming segment of the targeter) (e.g., of a Cas9 dual guide RNA or a Cas9 single guide RNA) can be 65% or more identical to one of the crRNA sequences set forth in SEQ ID NOs:563-679, or a complement thereof, over a stretch of 8 or more contiguous nucleotides (e.g., 8 or more contiguous nucleotides, 10 or more contiguous nucleotides, 12 or more contiguous nucleotides, 15 or more contiguous nucleotides, or 20 or more contiguous nucleotides). The duplex-forming segment of the targeter (or the DNA encoding the duplex-forming segment of the targeter) (e.g., of a Cas9 dual guide RNA or a Cas9 single guide RNA) can be 70% or more identical to one of the crRNA sequences set forth in SEQ ID NOs:563-679, or a complement thereof, over a stretch of 8 or more contiguous nucleotides (e.g., 8 or more contiguous nucleotides, 10 or more contiguous nucleotides, 12 or more contiguous nucleotides, 15 or more contiguous nucleotides, or 20 or more contiguous nucleotides). The duplex-forming segment of the targeter (or the DNA encoding the duplex-forming segment of the targeter) (e.g., of a Cas9 dual guide RNA or a Cas9 single guide RNA) can be 75% or more identical to one of the crRNA sequences set forth in SEQ ID NOs:563-679, or a complement thereof, over a stretch of 8 or more contiguous nucleotides (e.g., 8 or more contiguous nucleotides, 10 or more contiguous nucleotides, 12 or more contiguous nucleotides, 15 or more contiguous nucleotides, or 20 or more contiguous nucleotides). The duplex-forming segment of the targeter (or the DNA encoding the duplex-forming segment of the targeter) (e.g., of a Cas9 dual guide RNA or a Cas9 single guide RNA) can be 80% or more identical to one of the crRNA sequences set forth in SEQ ID NOs:563-679, or a complement thereof, over a stretch of 8 or more contiguous nucleotides (e.g., 8 or more contiguous nucleotides, 10 or more contiguous nucleotides, 12 or more contiguous nucleotides, 15 or more contiguous nucleotides, or 20 or more contiguous nucleotides). The duplex-forming segment of the targeter (or the DNA encoding the duplex-forming segment of the targeter) (e.g., of a Cas9 dual guide RNA or a Cas9 single guide RNA) can be 85% or more identical to one of the crRNA sequences set forth in SEQ ID NOs:563-679, or a complement thereof, over a stretch of 8 or more contiguous nucleotides (e.g., 8 or more contiguous nucleotides, 10 or more contiguous nucleotides, 12 or more contiguous nucleotides, 15 or more contiguous nucleotides, or 20 or more contiguous nucleotides). The duplex-forming segment of the targeter (or the DNA encoding the duplex-forming segment of the targeter) (e.g., of a Cas9 dual guide RNA or a Cas9 single guide RNA) can be 90% or more identical to one of the crRNA sequences set forth in SEQ ID NOs:563-679, or a complement thereof, over a stretch of 8 or more contiguous nucleotides (e.g., 8 or more contiguous nucleotides, 10 or more contiguous nucleotides, 12 or more contiguous nucleotides, 15 or more contiguous nucleotides, or 20 or more contiguous nucleotides). The duplex-forming segment of the targeter (or the DNA encoding the duplex-forming segment of the targeter) (e.g., of a Cas9 dual guide RNA or a Cas9 single guide RNA) can be 95% or more identical to one of the crRNA sequences set forth in SEQ ID NOs:563-679, or a complement thereof, over a stretch of 8 or more contiguous nucleotides (e.g., 8 or more contiguous nucleotides, 10 or more contiguous nucleotides, 12 or more contiguous nucleotides, 15 or more contiguous nucleotides, or 20 or more contiguous nucleotides). The duplex-forming segment of the targeter (or the DNA encoding the duplex-forming segment of the targeter) (e.g., of a Cas9 dual guide RNA or a Cas9 single guide RNA) can be 98% or more identical to one of the crRNA sequences set forth in SEQ ID NOs:563-679, or a complement thereof, over a stretch of 8 or more contiguous nucleotides (e.g., 8 or more contiguous nucleotides, 10 or more contiguous nucleotides, 12 or more contiguous nucleotides, 15 or more contiguous nucleotides, or 20 or more contiguous nucleotides). The duplex-forming segment of the targeter (or the DNA encoding the duplex-forming segment of the targeter) (e.g., of a Cas9 dual guide RNA or a Cas9 single guide RNA) can be 99% or more identical to one of the crRNA sequences set forth in SEQ ID NOs:563-679, or a complement thereof, over a stretch of 8 or more contiguous nucleotides (e.g., 8 or more contiguous nucleotides, 10 or more contiguous nucleotides, 12 or more contiguous nucleotides, 15 or more contiguous nucleotides, or 20 or more contiguous nucleotides). The duplex-forming segment of the targeter (or the DNA encoding the duplex-forming segment of the targeter) (e.g., of a Cas9 dual guide RNA or a Cas9 single guide RNA) can be 100% identical to one of the crRNA sequences set forth in SEQ ID NOs:563-679, or a complement thereof, over a stretch of 8 or more contiguous nucleotides (e.g., 8 or more contiguous nucleotides, 10 or more contiguous nucleotides, 12 or more contiguous nucleotides, 15 or more contiguous nucleotides, or 20 or more contiguous nucleotides).

[0458] A Cas9 single guide RNA comprises two stretches of nucleotides (a “targeter” and an “activator”) that are complementary to one another, hybridize to form the double stranded RNA duplex (dsRNA duplex) of the protein-binding segment (thus resulting in a stem-loop structure), and are covalently linked, e.g., by a linker of intervening nucleotides (“linker nucleotides”). Thus, a subject Cas9 single guide RNA (e.g., a single guide RNA) can comprise a targeter and an activator, each having a duplex-forming segment, where the duplex-forming segments of the targeter and the activator hybridize with one another to form a dsRNA duplex. The targeter and the activator can be covalently linked via the 3′ end of the targeter and the 5′ end of the activator. Alternatively, targeter and the activator can be covalently linked via the 5′ end of the targeter and the 3′ end of the activator.

[0459] The linker of a Cas9 single guide RNA can have a length of from 3 nucleotides to 100 nucleotides. For example, the linker can have a length of from 3 nucleotides (nt) to 90 nt, from 3 nucleotides (nt) to 80 nt, from 3 nucleotides (nt) to 70 nt, from 3 nucleotides (nt) to 60 nt, from 3 nucleotides (nt) to 50 nt, from 3 nucleotides (nt) to 40 nt, from 3 nucleotides (nt) to 30 nt, from 3 nucleotides (nt) to 20 nt or from 3 nucleotides (nt) to 10 nt. For example, the linker can have a length of from 3 nt to 5 nt, from 5 nt to 10 nt, from 10 nt to 15 nt, from 15 nt to 20 nt, from 20 nt to 25 nt, from 25 nt to 30 nt, from 30 nt to 35 nt, from 35 nt to 40 nt, from 40 nt to 50 nt, from 50 nt to 60 nt, from 60 nt to 70 nt, from 70 nt to 80 nt, from 80 nt to 90 nt, or from 90 nt to 100 nt. In some embodiments, the linker of a Cas9 single guide RNA is 4 nt.

[0460] A Cas9 single guide RNA comprises two complementary stretches of nucleotides (a targeter and an activator) that hybridize to form a dsRNA duplex. In some embodiments, one of the two complementary stretches of nucleotides of the Cas9 single guide RNA (or the DNA encoding the stretch) is 60% or more identical to one of the activator (tracrRNA) molecules set forth in SEQ ID NOs: 431-562 and 1535-1544, or a complement thereof, over a stretch of 8 or more contiguous nucleotides (e.g., 8 or more contiguous nucleotides, 10 or more contiguous nucleotides, 12 or more contiguous nucleotides, 15 or more contiguous nucleotides, or 20 or more contiguous nucleotides). For example, in some cases, one of the two complementary stretches of nucleotides of the Cas9 single guide RNA (or the DNA encoding the stretch) is 65% or more identical, 70% or more identical, 75% or more identical, 80% or more identical, 85% or more identical, 90% or more identical, 95% or more identical, 98% or more identical, 99% or more identical or 100% identical to one of the tracrRNA sequences set forth in SEQ ID NOs: 431-562 and 1535-1544, or a complement thereof, over a stretch of 8 or more contiguous nucleotides (e.g., 8 or more contiguous nucleotides, 10 or more contiguous nucleotides, 12 or more contiguous nucleotides, 15 or more contiguous nucleotides, or 20 or more contiguous nucleotides).

[0461] In some embodiments, one of the two complementary stretches of nucleotides of the Cas9 single guide RNA (or the DNA encoding the stretch) is 60% or more identical to one of the targeter (crRNA) sequences set forth in SEQ ID NOs:563-679, or a complement thereof, over a stretch of 8 or more contiguous nucleotides (e.g., 8 or more contiguous nucleotides, 10 or more contiguous nucleotides, 12 or more contiguous nucleotides, 15 or more contiguous nucleotides, or 20 or more contiguous nucleotides). For example, in some cases one of the two complementary stretches of nucleotides of the Cas9 single guide RNA (or the DNA encoding the stretch) is 65% or more identical, 70% or more identical, 75% or more identical, 80% or more identical, 85% or more identical, 90% or more identical, 95% or more identical, 98% or more identical, 99% or more identical or 100% identical to one of the crRNA sequences set forth in SEQ ID NOs:563-679, or a complement thereof, over a stretch of 8 or more contiguous nucleotides (e.g., 8 or more contiguous nucleotides, 10 or more contiguous nucleotides, 12 or more contiguous nucleotides, 15 or more contiguous nucleotides, or 20 or more contiguous nucleotides).

[0462] In some embodiments, one of the two complementary stretches of nucleotides of the Cas9 single guide RNA (or the DNA encoding the stretch) is 60% or more identical to one of the targeter (crRNA) sequences or activator (tracrRNA) sequences set forth in SEQ ID NOs: 431-679 and 1535-1544, or a complement thereof, over a stretch of 8 or more contiguous nucleotides (e.g., 8 or more contiguous nucleotides, 10 or more contiguous nucleotides, 12 or more contiguous nucleotides, 15 or more contiguous nucleotides, or 20 or more contiguous nucleotides). For example, one of the two complementary stretches of nucleotides of the Cas9 single guide RNA (or the DNA encoding the stretch) can be 65% or more identical to one of the sequences set forth in SEQ ID NOs: 431-679 and 1535-1544, or a complement thereof, over a stretch of 8 or more contiguous nucleotides (e.g., 8 or more contiguous nucleotides, 10 or more contiguous nucleotides, 12 or more contiguous nucleotides, 15 or more contiguous nucleotides, or 20 or more contiguous nucleotides). One of the two complementary stretches of nucleotides of the Cas9 single guide RNA (or the DNA encoding the stretch) can be 70% or more identical to one of the sequences set forth in SEQ ID NOs: 431-679 and 1535-1544, or a complement thereof, over a stretch of 8 or more contiguous nucleotides (e.g., 8 or more contiguous nucleotides, 10 or more contiguous nucleotides, 12 or more contiguous nucleotides, 15 or more contiguous nucleotides, or 20 or more contiguous nucleotides). One of the two complementary stretches of nucleotides of the Cas9 single guide RNA (or the DNA encoding the stretch) can be 75% or more identical to one of the sequences set forth in SEQ ID NOs: 431-679 and 1535-1544, or a complement thereof, over a stretch of 8 or more contiguous nucleotides (e.g., 8 or more contiguous nucleotides, 10 or more contiguous nucleotides, 12 or more contiguous nucleotides, 15 or more contiguous nucleotides, or 20 or more contiguous nucleotides). One of the two complementary stretches of nucleotides of the Cas9 single guide RNA (or the DNA encoding the stretch) can be 80% or more identical to one of the sequences set forth in SEQ ID NOs: 431-679 and 1535-1544, or a complement thereof, over a stretch of 8 or more contiguous nucleotides (e.g., 8 or more contiguous nucleotides, 10 or more contiguous nucleotides, 12 or more contiguous nucleotides, 15 or more contiguous nucleotides, or 20 or more contiguous nucleotides). One of the two complementary stretches of nucleotides of the Cas9 single guide RNA (or the DNA encoding the stretch) can be 85% or more identical to one of the sequences set forth in SEQ ID NOs: 431-679 and 1535-1544, or a complement thereof, over a stretch of 8 or more contiguous nucleotides (e.g., 8 or more contiguous nucleotides, 10 or more contiguous nucleotides, 12 or more contiguous nucleotides, 15 or more contiguous nucleotides, or 20 or more contiguous nucleotides). One of the two complementary stretches of nucleotides of the Cas9 single guide RNA (or the DNA encoding the stretch) can be 90% or more identical to one of the sequences set forth in SEQ ID NOs: 431-679 and 1535-1544, or a complement thereof, over a stretch of 8 or more contiguous nucleotides (e.g., 8 or more contiguous nucleotides, 10 or more contiguous nucleotides, 12 or more contiguous nucleotides, 15 or more contiguous nucleotides, or 20 or more contiguous nucleotides). One of the two complementary stretches of nucleotides of the Cas9 single guide RNA (or the DNA encoding the stretch) can be 95% or more identical to one of the sequences set forth in SEQ ID NOs: 431-679 and 1535-1544, or a complement thereof, over a stretch of 8 or more contiguous nucleotides (e.g., 8 or more contiguous nucleotides, 10 or more contiguous nucleotides, 12 or more contiguous nucleotides, 15 or more contiguous nucleotides, or 20 or more contiguous nucleotides). One of the two complementary stretches of nucleotides of the Cas9 single guide RNA (or the DNA encoding the stretch) can be 98% or more identical to one of the sequences set forth in SEQ ID NOs: 431-679 and 1535-1544, or a complement thereof, over a stretch of 8 or more contiguous nucleotides (e.g., 8 or more contiguous nucleotides, 10 or more contiguous nucleotides, 12 or more contiguous nucleotides, 15 or more contiguous nucleotides, or 20 or more contiguous nucleotides). One of the two complementary stretches of nucleotides of the Cas9 single guide RNA (or the DNA encoding the stretch) can be 99% or more identical to one of the sequences set forth in SEQ ID NOs: 431-679 and 1535-1544, or a complement thereof, over a stretch of 8 or more contiguous nucleotides (e.g., 8 or more contiguous nucleotides, 10 or more contiguous nucleotides, 12 or more contiguous nucleotides, 15 or more contiguous nucleotides, or 20 or more contiguous nucleotides). One of the two complementary stretches of nucleotides of the Cas9 single guide RNA (or the DNA encoding the stretch) can be 100% identical to one of the sequences set forth in SEQ ID NOs: 431-679 and 1535-1544, or a complement thereof, over a stretch of 8 or more contiguous nucleotides (e.g., 8 or more contiguous nucleotides, 10 or more contiguous nucleotides, 12 or more contiguous nucleotides, 15 or more contiguous nucleotides, or 20 or more contiguous nucleotides).

[0463] Appropriate cognate pairs of targeters and activators can be routinely determined for SEQ ID NOs:431-679 and 1535-1544, e.g., by taking into account the species name and base-pairing (for the dsRNA duplex of the protein-binding domain). Any corresponding activator/targeter pair can be used as part of a subject dual Cas9 guide RNA or as part of a subject Cas9 single guide RNA.

[0464] In some cases, an activator (e.g., a tracrRNA, tracrRNA-like molecule, etc.) of a Cas9 dual guide RNA (e.g., a dual guide RNA) or a Cas9 single guide RNA (e.g., a single guide RNA) includes a stretch of nucleotides with 60% or more sequence identity (e.g., 65% or more, 70% or more, 75% or more, 80% or more, 85% or more, 90% or more, 95% or more, 98% or more, or 100% sequence identity) with a naturally existing activator (tracrRNA) molecule. In some cases, an activator (e.g., a tracrRNA, tracrRNA-like molecule, etc.) of a Cas9 dual guide RNA (e.g., a dual guide RNA) or a Cas9 single guide RNA (e.g., a single guide RNA) includes a stretch of nucleotides with 60% or more sequence identity (e.g., 65% or more, 70% or more, 75% or more, 80% or more, 85% or more, 90% or more, 95% or more, 98% or more, or 100% sequence identity) with an activator (tracrRNA) molecule set forth in any one of SEQ ID NOs:431-562 and 1535-1544, or a complement thereof. In some cases, an activator (e.g., a tracrRNA, tracrRNA-like molecule, etc.) of a Cas9 dual guide RNA (e.g., a dual guide RNA) or a Cas9 single guide RNA (e.g., a single guide RNA) includes a stretch of nucleotides with 70% or more sequence identity with an activator (tracrRNA) molecule set forth in any one of SEQ ID NOs:431-562 and 1535-1544, or a complement thereof. In some cases, an activator (e.g., a tracrRNA, tracrRNA-like molecule, etc.) of a Cas9 dual guide RNA (e.g., a dual guide RNA) or a Cas9 single guide RNA (e.g., a single guide RNA) includes a stretch of nucleotides with 75% or more sequence identity with an activator (tracrRNA) molecule set forth in any one of SEQ ID NOs:431-562 and 1535-1544, or a complement thereof. In some cases, an activator (e.g., a tracrRNA, tracrRNA-like molecule, etc.) of a Cas9 dual guide RNA (e.g., a dual guide RNA) or a Cas9 single guide RNA (e.g., a single guide RNA) includes a stretch of nucleotides with 80% or more sequence identity with an activator (tracrRNA) molecule set forth in any one of SEQ ID NOs:431-562 and 1535-1544, or a complement thereof. In some cases, an activator (e.g., a tracrRNA, tracrRNA-like molecule, etc.) of a Cas9 dual guide RNA (e.g., a dual guide RNA) or a Cas9 single guide RNA (e.g., a single guide RNA) includes a stretch of nucleotides with 85% or more sequence identity with an activator (tracrRNA) molecule set forth in any one of SEQ ID NOs:431-562 and 1535-1544, or a complement thereof. In some cases, an activator (e.g., a tracrRNA, tracrRNA-like molecule, etc.) of a Cas9 dual guide RNA (e.g., a dual guide RNA) or a Cas9 single guide RNA (e.g., a single guide RNA) includes a stretch of nucleotides with 90% or more sequence identity with an activator (tracrRNA) molecule set forth in any one of SEQ ID NOs:431-562 and 1535-1544, or a complement thereof. In some cases, an activator (e.g., a tracrRNA, tracrRNA-like molecule, etc.) of a Cas9 dual guide RNA (e.g., a dual guide RNA) or a Cas9 single guide RNA (e.g., a single guide RNA) includes a stretch of nucleotides with 95% or more sequence identity with an activator (tracrRNA) molecule set forth in any one of SEQ ID NOs:431-562 and 1535-1544, or a complement thereof. In some cases, an activator (e.g., a tracrRNA, tracrRNA-like molecule, etc.) of a Cas9 dual guide RNA (e.g., a dual guide RNA) or a Cas9 single guide RNA (e.g., a single guide RNA) includes a stretch of nucleotides with 98% or more sequence identity with an activator (tracrRNA) molecule set forth in any one of SEQ ID NOs:431-562 and 1535-1544, or a complement thereof. In some cases, an activator (e.g., a tracrRNA, tracrRNA-like molecule, etc.) of a Cas9 dual guide RNA (e.g., a dual guide RNA) or a Cas9 single guide RNA (e.g., a single guide RNA) includes a stretch of nucleotides with 100% sequence identity with an activator (tracrRNA) molecule set forth in any one of SEQ ID NOs:431-562 and 1535-1544, or a complement thereof.

[0465] In some cases, an activator (e.g., a tracrRNA, tracrRNA-like molecule, etc.) of a Cas9 dual guide RNA (e.g., a dual guide RNA) or a Cas9 single guide RNA (e.g., a single guide RNA) includes a stretch of nucleotides with 60% or more sequence identity (e.g., 65% or more, 70% or more, 75% or more, 80% or more, 85% or more, 90% or more, 95% or more, 98% or more, or 100% sequence identity) with a nucleotide sequence set forth in any one of SEQ ID NOs:431-679 and 1535-1544, or a complement thereof. In some cases, an activator (e.g., a tracrRNA, tracrRNA-like molecule, etc.) of a Cas9 dual guide RNA (e.g., a dual guide RNA) or a Cas9 single guide RNA (e.g., a single guide RNA) includes a stretch of nucleotides with 70% or more sequence identity with a nucleotide sequence set forth in any one of SEQ ID NOs: 431-679 and 1535-1544, or a complement thereof. In some cases, an activator (e.g., a tracrRNA, tracrRNA-like molecule, etc.) of a Cas9 dual guide RNA (e.g., a dual guide RNA) or a Cas9 single guide RNA (e.g., a single guide RNA) includes a stretch of nucleotides with 75% or more sequence identity with a nucleotide sequence set forth in any one of SEQ ID NOs: 431-679 and 1535-1544, or a complement thereof. In some cases, an activator (e.g., a tracrRNA, tracrRNA-like molecule, etc.) of a Cas9 dual guide RNA (e.g., a dual guide RNA) or a Cas9 single guide RNA (e.g., a single guide RNA) includes a stretch of nucleotides with 80% or more sequence identity with a nucleotide sequence set forth in any one of SEQ ID NOs: 431-679 and 1535-1544, or a complement thereof. In some cases, an activator (e.g., a tracrRNA, tracrRNA-like molecule, etc.) of a Cas9 dual guide RNA (e.g., a dual guide RNA) or a Cas9 single guide RNA (e.g., a single guide RNA) includes a stretch of nucleotides with 85% or more sequence identity with a nucleotide sequence set forth in any one of SEQ ID NOs: 431-679 and 1535-1544, or a complement thereof. In some cases, an activator (e.g., a tracrRNA, tracrRNA-like molecule, etc.) of a Cas9 dual guide RNA (e.g., a dual guide RNA) or a Cas9 single guide RNA (e.g., a single guide RNA) includes a stretch of nucleotides with 90% or more sequence identity with a nucleotide sequence set forth in any one of SEQ ID NOs: 431-679 and 1535-1544, or a complement thereof. In some cases, an activator (e.g., a tracrRNA, tracrRNA-like molecule, etc.) of a Cas9 dual guide RNA (e.g., a dual guide RNA) or a Cas9 single guide RNA (e.g., a single guide RNA) includes a stretch of nucleotides with 95% or more sequence identity with a nucleotide sequence set forth in any one of SEQ ID NOs: 431-679 and 1535-1544, or a complement thereof. In some cases, an activator (e.g., a tracrRNA, tracrRNA-like molecule, etc.) of a Cas9 dual guide RNA (e.g., a dual guide RNA) or a Cas9 single guide RNA (e.g., a single guide RNA) includes a stretch of nucleotides with 98% or more sequence identity with a nucleotide sequence set forth in any one of SEQ ID NOs: 431-679 and 1535-1544, or a complement thereof. In some cases, an activator (e.g., a tracrRNA, tracrRNA-like molecule, etc.) of a Cas9 dual guide RNA (e.g., a dual guide RNA) or a Cas9 single guide RNA (e.g., a single guide RNA) includes a stretch of nucleotides with 100% sequence identity with a nucleotide sequence set forth in any one of SEQ ID NOs: 431-679 and 1535-1544, or a complement thereof.

[0466] In some cases, an activator (e.g., a tracrRNA, tracrRNA-like molecule, etc.) of a Cas9 dual guide RNA (e.g., a dual guide RNA) or a Cas9 single guide RNA (e.g., a single guide RNA) includes 30 or more nucleotides (nt) (e.g., 40 or more, 50 or more, 60 or more, 70 or more, 75 or more nt). In some cases, an activator (e.g., a tracrRNA, tracrRNA-like molecule, etc.) of a Cas9 dual guide RNA (e.g., a dual guide RNA) or a Cas9 single guide RNA (e.g., a single guide RNA) has a length in a range of from 25 to 300 nucleotides (nt) (e.g., 30 to 300 nt, 40 to 300 nt, 50 to 300 nt, 60 to 300 nt, 65 to 300 nt, 70 to 300 nt, 75 to 300 nt, 30 to 200 nt, 40 to 200 nt, 50 to 200 nt, 60 to 200 nt, 65 to 200 nt, 70 to 200 nt, 75 to 200 nt, 30 to 150 nt, 40 to 150 nt, 50 to 150 nt, 60 to 150 nt, 65 to 150 nt, 70 to 150 nt, 75 to 150 nt, 30 to 100 nt, 40 to 100 nt, 50 to 100 nt, 60 to 100 nt, 65 to 100 nt, 70 to 100 nt, 75 to 100 nt, 30 to 75 nt, 30 to 65 nt, 30 to 50 nt, or 30 to 40 nt). In some cases, an activator (e.g., a tracrRNA, tracrRNA-like molecule, etc.) of a dual Cas9 guide RNA (e.g., a dual guide RNA) or a Cas9 single guide RNA (e.g., a single guide RNA) has a length in a range of from 30 to 200 nucleotides (nt) (e.g., 40 to 200 nucleotides, 50 to 200 nucleotides, 60 to 200 nucleotides, 65 to 200 nucleotides, 70 to 200 nucleotides, 75 to 200 nucleotides, 40 to 150 nucleotides, 50 to 150 nucleotides, 60 to 150 nucleotides, 65 to 150 nucleotides, 70 to 150 nucleotides, 75 to 150 nucleotides, 40 to 100 nucleotides, 50 to 100 nucleotides, 60 to 100 nucleotides, 65 to 100 nucleotides, 70 to 100 nucleotides, or 75 to 100 nucleotides).

[0467] In some cases, the protein-binding segment has a length of from 10 nucleotides to 300 nucleotides. Also with regard to both a subject Cas9 single guide RNA and to a subject Cas9 dual guide RNA, the dsRNA duplex of the protein-binding segment can have a length from 6 base pairs (bp) to 50 bp (e.g., from 6 bp to 40 bp, from 6 bp to 35 bp, from 6 bp to 30 bp, from 6 bp to 25 bp, from 6 bp to 20 bp, from 6 bp to 15 bp, from 8 bp to 50 bp, from 8 bp to 40 bp, from 8 bp to 35 bp, from 8 bp to 30 bp, from 8 bp to 25 bp, from 8 bp to 20 bp, from 8 bp to 15 bp, from 10 bp to 50 bp, from 10 bp to 40 bp, from 10 bp to 35 bp, from 10 bp to 30 bp, from 10 bp to 25 bp, from 10 bp to 20 bp, from 10 bp to 15 bp, from 12 bp to 50 bp, from 12 bp to 40 bp, from 12 bp to 35 bp, from 12 bp to 30 bp, from 12 bp to 25 bp, from 12 bp to 20 bp, or from 12 bp to 15 bp). In some embodiments, the dsRNA duplex of the protein-binding segment has a length of 8 or more base pairs (bp) (e.g., 10 or more bp, 12 or more bp, or 15 or more bp). In some embodiments, the dsRNA duplex of the protein-binding segment has a length of from 12 to 40 base pairs. In some embodiments, the dsRNA duplex of the protein-binding segment has fewer base pairs than the dsRNA duplex of a corresponding dsRNA duplex of a corresponding wild type Cas9 guide RNA.

[0468] The percent complementarity between the nucleotide sequences that hybridize to form the dsRNA duplex of the protein-binding segment can be 60% or more. For example, the percent complementarity between the nucleotide sequences that hybridize to form the dsRNA duplex of the protein-binding segment can be 65% or more, 70% or more, 75% or more, 80% or more, 85% or more, 90% or more, 95% or more, 98% or more, or 99% or more. In some cases, the dsRNA duplex of the protein binding segment includes a “bulge”, e.g., a region of non-complementarity (which, e.g., can result in two (or more) sub-regions of complementarity separated by one region (or more) of non-complementarity). In some cases, the percent complementarity between the nucleotide sequences that hybridize to form the dsRNA duplex of the protein-binding segment is 100%.

[0469] In some embodiments, a suitable Cas9 guide RNA comprises two separate molecules (an activator and a targeter). In some cases, the first of the two separate molecules (e.g., the activator, the targeter) comprises a nucleotide sequence having 60% or more (e.g., 65% or more, 70% or more, 75% or more, 80% or more, 85% or more, 90% or more, 95% or more, 98% or more, 99% or more, or 100%) nucleotide sequence identity over a stretch of 8 or more contiguous nucleotides (e.g., 8 or more contiguous nucleotides, 10 or more contiguous nucleotides, 12 or more contiguous nucleotides, 15 or more contiguous nucleotides, or 20 or more contiguous nucleotides) to any one of the nucleotide sequences set forth in SEQ ID NOs:431-562 and 1535-1544, or a complement thereof. In some cases, the second of the two separate molecules (e.g., the targeter, the activator) comprises a nucleotide sequence having 60% or more (e.g., 65% or more, 70% or more, 75% or more, 80% or more, 85% or more, 90% or more, 95% or more, 98% or more, 99% or more, or 100%) nucleotide sequence identity over a stretch of 8 or more contiguous nucleotides (e.g., 8 or more contiguous nucleotides, 10 or more contiguous nucleotides, 12 or more contiguous nucleotides, 15 or more contiguous nucleotides, or 20 or more contiguous nucleotides) to any one of the nucleotide sequences set forth in SEQ ID NOs:563-679, or a complement thereof.

[0470] In some embodiments, a suitable Cas9 guide RNA is a single RNA polynucleotide and comprises a first nucleotide sequence having 60% or more (e.g., 65% or more, 70% or more, 75% or more, 80% or more, 85% or more, 90% or more, 95% or more, 98% or more, 99% or more, or 100%) nucleotide sequence identity over a stretch of 8 or more contiguous nucleotides (e.g., 8 or more contiguous nucleotides, 10 or more contiguous nucleotides, 12 or more contiguous nucleotides, 15 or more contiguous nucleotides, or 20 or more contiguous nucleotides) to any one of the nucleotide sequences set forth in SEQ ID NOs:431-562 and 1535-1544, and a second nucleotide sequence having 60% or more (e.g., 65% or more, 70% or more, 75% or more, 80% or more, 85% or more, 90% or more, 95% or more, 98% or more, 99% or more, or 100%) nucleotide sequence identity over a stretch of 8 or more contiguous nucleotides (e.g., 8 or more contiguous nucleotides, 10 or more contiguous nucleotides, 12 or more contiguous nucleotides, 15 or more contiguous nucleotides, or 20 or more contiguous nucleotides) to any one of the nucleotide sequences set forth in SEQ ID NOs: 463-679.

[0471] In some embodiments, the targeter comprises the sequence 5′GUUUUAGAGCUA-3′ (SEQ ID NO:679) linked at its 5′ end to a stretch of nucleotides that are complementary to a target nucleic acid. In some embodiments, the activator comprises the sequence 5′-UAGCAAGUUAAAAUAAGGCUAGUCCG-3′ (SEQ ID NO:397).

[0472] In some embodiments, a Cas9 guide RNA comprises the sequence 5′-GUUUUAGAGCUA-linker-UAGCAAGUUAAAAUAAGGCUAGUCCG-3′ (SEQ ID NO:680) linked at its 5′ end to a stretch of nucleotides that are complementary to a target nucleic acid (where “linker” denotes any a linker nucleotide sequence that can comprise any nucleotide sequence). Illustrative examples of Cas9 single guide RNAs include those set forth in SEQ ID NOs: 680-682.

[0473] A subject dual guide RNA comprises two separate nucleic acid molecules. Each of the two molecules of a subject dual guide RNA comprises a stretch of nucleotides that are complementary to one another such that the complementary nucleotides of the two molecules hybridize to form the double stranded RNA duplex of the protein-binding segment. In some embodiments, the duplex-forming segment of the activator is 60% or more identical to one of the activator (tracrRNA) molecules set forth in SEQ ID NOs:431-562 and 1535-1544, or a complement thereof, over a stretch of 8 or more contiguous nucleotides (e.g., 8 or more contiguous nucleotides, 10 or more contiguous nucleotides, 12 or more contiguous nucleotides, 15 or more contiguous nucleotides, or 20 or more contiguous nucleotides). For example, the duplex-forming segment of the activator (or the DNA encoding the duplex-forming segment of the activator) can be 65% or more identical to one of the tracrRNA sequences set forth in SEQ ID NOs:431-562 and 1535-1544, or a complement thereof, over a stretch of 8 or more contiguous nucleotides (e.g., 8 or more contiguous nucleotides, 10 or more contiguous nucleotides, 12 or more contiguous nucleotides, 15 or more contiguous nucleotides, or 20 or more contiguous nucleotides). The duplex-forming segment of the activator (or the DNA encoding the duplex-forming segment of the activator) can be 70% or more identical to one of the tracrRNA sequences set forth in SEQ ID NOs:431-562 and 1535-1544, or a complement thereof, over a stretch of 8 or more contiguous nucleotides (e.g., 8 or more contiguous nucleotides, 10 or more contiguous nucleotides, 12 or more contiguous nucleotides, 15 or more contiguous nucleotides, or 20 or more contiguous nucleotides). The duplex-forming segment of the activator (or the DNA encoding the duplex-forming segment of the activator) can be 75% or more identical to one of the tracrRNA sequences set forth in SEQ ID NOs:431-562 and 1535-1544, or a complement thereof, over a stretch of 8 or more contiguous nucleotides (e.g., 8 or more contiguous nucleotides, 10 or more contiguous nucleotides, 12 or more contiguous nucleotides, 15 or more contiguous nucleotides, or 20 or more contiguous nucleotides). The duplex-forming segment of the activator (or the DNA encoding the duplex-forming segment of the activator) can be 80% or more identical to one of the tracrRNA sequences set forth in SEQ ID NOs:431-562 and 1535-1544, or a complement thereof, over a stretch of 8 or more contiguous nucleotides (e.g., 8 or more contiguous nucleotides, 10 or more contiguous nucleotides, 12 or more contiguous nucleotides, 15 or more contiguous nucleotides, or 20 or more contiguous nucleotides). The duplex-forming segment of the activator (or the DNA encoding the duplex-forming segment of the activator) can be 85% or more identical to one of the tracrRNA sequences set forth in SEQ ID NOs:431-562 and 1535-1544, or a complement thereof, over a stretch of 8 or more contiguous nucleotides (e.g., 8 or more contiguous nucleotides, 10 or more contiguous nucleotides, 12 or more contiguous nucleotides, 15 or more contiguous nucleotides, or 20 or more contiguous nucleotides). The duplex-forming segment of the activator (or the DNA encoding the duplex-forming segment of the activator) can be 90% or more identical to one of the tracrRNA sequences set forth in SEQ ID NOs:431-562 and 1535-1544, or a complement thereof, over a stretch of 8 or more contiguous nucleotides (e.g., 8 or more contiguous nucleotides, 10 or more contiguous nucleotides, 12 or more contiguous nucleotides, 15 or more contiguous nucleotides, or 20 or more contiguous nucleotides). The duplex-forming segment of the activator (or the DNA encoding the duplex-forming segment of the activator) can be 95% or more identical to one of the tracrRNA sequences set forth in SEQ ID NOs:431-562 and 1535-1544, or a complement thereof, over a stretch of 8 or more contiguous nucleotides (e.g., 8 or more contiguous nucleotides, 10 or more contiguous nucleotides, 12 or more contiguous nucleotides, 15 or more contiguous nucleotides, or 20 or more contiguous nucleotides). The duplex-forming segment of the activator (or the DNA encoding the duplex-forming segment of the activator) can be 98% or more identical to one of the tracrRNA sequences set forth in SEQ ID NOs:431-562 and 1535-1544, or a complement thereof, over a stretch of 8 or more contiguous nucleotides (e.g., 8 or more contiguous nucleotides, 10 or more contiguous nucleotides, 12 or more contiguous nucleotides, 15 or more contiguous nucleotides, or 20 or more contiguous nucleotides). The duplex-forming segment of the activator (or the DNA encoding the duplex-forming segment of the activator) can be 99% or more identical to one of the tracrRNA sequences set forth in SEQ ID NOs:431-562 and 1535-1544, or a complement thereof, over a stretch of 8 or more contiguous nucleotides (e.g., 8 or more contiguous nucleotides, 10 or more contiguous nucleotides, 12 or more contiguous nucleotides, 15 or more contiguous nucleotides, or 20 or more contiguous nucleotides). The duplex-forming segment of the activator (or the DNA encoding the duplex-forming segment of the activator) can be 100% identical to one of the tracrRNA sequences set forth in SEQ ID NOs:431-562 and 1535-1544, or a complement thereof, over a stretch of 8 or more contiguous nucleotides (e.g., 8 or more contiguous nucleotides, 10 or more contiguous nucleotides, 12 or more contiguous nucleotides, 15 or more contiguous nucleotides, or 20 or more contiguous nucleotides).

[0474] In some embodiments, the duplex-forming segment of the targeter is 60% or more identical to one of the targeter (crRNA) sequences set forth in SEQ ID NOs:563-679, or a complement thereof, over a stretch of 8 or more contiguous nucleotides (e.g., 8 or more contiguous nucleotides, 10 or more contiguous nucleotides, 12 or more contiguous nucleotides, 15 or more contiguous nucleotides, or 20 or more contiguous nucleotides). For example, the duplex-forming segment of the targeter (or the DNA encoding the duplex-forming segment of the targeter) can be 65% or more identical to one of the crRNA sequences set forth in SEQ ID NOs:563-679, or a complement thereof, over a stretch of 8 or more contiguous nucleotides (e.g., 8 or more contiguous nucleotides, 10 or more contiguous nucleotides, 12 or more contiguous nucleotides, 15 or more contiguous nucleotides, or 20 or more contiguous nucleotides). The duplex-forming segment of the targeter (or the DNA encoding the duplex-forming segment of the targeter) can be 70% or more identical to one of the crRNA sequences set forth in SEQ ID NOs:563-679, or a complement thereof, over a stretch of 8 or more contiguous nucleotides (e.g., 8 or more contiguous nucleotides, 10 or more contiguous nucleotides, 12 or more contiguous nucleotides, 15 or more contiguous nucleotides, or 20 or more contiguous nucleotides). The duplex-forming segment of the targeter (or the DNA encoding the duplex-forming segment of the targeter) can be 75% or more identical to one of the crRNA sequences set forth in SEQ ID NOs:563-679, or a complement thereof, over a stretch of 8 or more contiguous nucleotides (e.g., 8 or more contiguous nucleotides, 10 or more contiguous nucleotides, 12 or more contiguous nucleotides, 15 or more contiguous nucleotides, or 20 or more contiguous nucleotides). The duplex-forming segment of the targeter (or the DNA encoding the duplex-forming segment of the targeter) can be 80% or more identical to one of the crRNA sequences set forth in SEQ ID NOs:563-679, or a complement thereof, over a stretch of 8 or more contiguous nucleotides (e.g., 8 or more contiguous nucleotides, 10 or more contiguous nucleotides, 12 or more contiguous nucleotides, 15 or more contiguous nucleotides, or 20 or more contiguous nucleotides). The duplex-forming segment of the targeter (or the DNA encoding the duplex-forming segment of the targeter) can be 85% or more identical to one of the crRNA sequences set forth in SEQ ID NOs:563-679, or a complement thereof, over a stretch of 8 or more contiguous nucleotides (e.g., 8 or more contiguous nucleotides, 10 or more contiguous nucleotides, 12 or more contiguous nucleotides, 15 or more contiguous nucleotides, or 20 or more contiguous nucleotides). The duplex-forming segment of the targeter (or the DNA encoding the duplex-forming segment of the targeter) can be 90% or more identical to one of the crRNA sequences set forth in SEQ ID NOs:563-679, or a complement thereof, over a stretch of 8 or more contiguous nucleotides (e.g., 8 or more contiguous nucleotides, 10 or more contiguous nucleotides, 12 or more contiguous nucleotides, 15 or more contiguous nucleotides, or 20 or more contiguous nucleotides). The duplex-forming segment of the targeter (or the DNA encoding the duplex-forming segment of the targeter) can be 95% or more identical to one of the crRNA sequences set forth in SEQ ID NOs:563-679, or a complement thereof, over a stretch of 8 or more contiguous nucleotides (e.g., 8 or more contiguous nucleotides, 10 or more contiguous nucleotides, 12 or more contiguous nucleotides, 15 or more contiguous nucleotides, or 20 or more contiguous nucleotides). The duplex-forming segment of the targeter (or the DNA encoding the duplex-forming segment of the targeter) can be 98% or more identical to one of the crRNA sequences set forth in SEQ ID NOs:563-679, or a complement thereof, over a stretch of 8 or more contiguous nucleotides (e.g., 8 or more contiguous nucleotides, 10 or more contiguous nucleotides, 12 or more contiguous nucleotides, 15 or more contiguous nucleotides, or 20 or more contiguous nucleotides). The duplex-forming segment of the targeter (or the DNA encoding the duplex-forming segment of the targeter) can be 99% or more identical to one of the crRNA sequences set forth in SEQ ID NOs:563-679, or a complement thereof, over a stretch of 8 or more contiguous nucleotides (e.g., 8 or more contiguous nucleotides, 10 or more contiguous nucleotides, 12 or more contiguous nucleotides, 15 or more contiguous nucleotides, or 20 or more contiguous nucleotides). The duplex-forming segment of the targeter (or the DNA encoding the duplex-forming segment of the targeter) can be 100% identical to one of the crRNA sequences set forth in SEQ ID NOs:563-679, or a complement thereof, over a stretch of 8 or more contiguous nucleotides (e.g., 8 or more contiguous nucleotides, 10 or more contiguous nucleotides, 12 or more contiguous nucleotides, 15 or more contiguous nucleotides, or 20 or more contiguous nucleotides).

[0475] Non-limiting examples of nucleotide sequences that can be included in a dual Cas9 guide RNA include sequences that can hybridize to form a protein binding segment, such as the sequences set forth in SEQ ID NOs:431-562 and 1535-1544, or complements thereof, pairing with sequences set forth in SEQ ID NOs:563-679, or complements thereof t.

[0476] A dual guide RNA can be designed to allow for controlled (i.e., conditional) binding of a targeter with an activator. Because a Cas9 dual guide RNA is not functional unless both the activator and the targeter are bound in a functional complex with Cas9, a dual guide RNA can be inducible (e.g., drug inducible) by rendering the binding between the activator and the targeter to be inducible. As one non-limiting example, RNA aptamers can be used to regulate (i.e., control) the binding of the activator with the targeter. Accordingly, the activator and/or the targeter can include an RNA aptamer sequence.

[0477] Aptamers (e.g., RNA aptamers) are known in the art and are generally a synthetic version of a riboswitch. The terms “RNA aptamer” and “riboswitch” are used interchangeably herein to encompass both synthetic and natural nucleic acid sequences that provide for inducible regulation of the structure (and therefore the availability of specific sequences) of the nucleic acid molecule (e.g., RNA, DNA/RNA hybrid, etc.) of which they are part. RNA aptamers usually comprise a sequence that folds into a particular structure (e.g., a hairpin), which specifically binds a particular drug (e.g., a small molecule). Binding of the drug causes a structural change in the folding of the RNA, which changes a feature of the nucleic acid of which the aptamer is a part. As non-limiting examples: (i) an activator with an aptamer may not be able to bind to the cognate targeter unless the aptamer is bound by the appropriate drug; (ii) a targeter with an aptamer may not be able to bind to the cognate activator unless the aptamer is bound by the appropriate drug; and (iii) a targeter and an activator, each comprising a different aptamer that binds a different drug, may not be able to bind to each other unless both drugs are present. As illustrated by these examples, a Cas9 dual guide RNA can be designed to be inducible.

[0478] Examples of aptamers and riboswitches can be found, for example, in: Nakamura et al., Genes Cells. 2012 May; 17(5):344-64; Vavalle et al., Future Cardiol. 2012 May; 8(3):371-82; Citartan et al., Biosens Bioelectron. 2012 Apr. 15; 34(1):1-11; and Liberman et al., Wiley Interdiscip Rev RNA. 2012 May-June; 3(3):369-84; all of which are herein incorporated by reference in their entirety.

### Hybrid Cas9 Guide RNAs

[0479] As noted above, in some cases, a Cas9 guide RNA is a DNA/RNA hybrid molecule. In such cases, the protein-binding segment of the Cas9 guide RNA is RNA and forms an RNA duplex. However, the targeting segment of a Cas9 guide RNA can be DNA. Thus, if a DNA/RNA hybrid guide nucleic acid is a dual guide nucleic acid, the “targeter” molecule and be a hybrid molecule (e.g., the targeting segment can be DNA and the duplex-forming segment can be RNA). In such cases, the duplex-forming segment of the “activator” molecule can be RNA (e.g., in order to form an RNA-duplex with the duplex-forming segment of the targeter molecule), while nucleotides of the “activator” molecule that are outside of the duplex-forming segment can be DNA (in which case the activator molecule is a hybrid DNA/RNA molecule) or can be RNA (in which case the activator molecule is RNA). If a DNA/RNA hybrid guide nucleic acid is a single guide nucleic acid, then the targeting segment can be DNA, the duplex-forming segments (which make up the protein-binding segment) can be RNA, and nucleotides outside of the targeting and duplex-forming segments can be RNA or DNA. The “targeter” can also be referred to as a “targeter RNA” (even though in some cases a targeter RNA can have deoxyribonucleotides and/or other modifications) and the “activator” can be referred to as an “activator RNA” (even though in some cases a targeter RNA can have deoxyribonucleotides and/or other modifications).

[0480] A DNA/RNA hybrid Cas9 guide RNA can be useful in some cases, for example, when a target nucleic acid is an RNA. Cas9 normally associates with a guide RNA that hybridizes with a target DNA, thus forming a DNA-RNA duplex at the target site. Therefore, when the target nucleic acid is an RNA, it is sometimes advantageous to recapitulate a DNA-RNA duplex at the target site by using a targeting segment (of the Cas9 guide RNA) that is DNA instead of RNA. However, because the protein-binding segment of a Cas9 guide RNA is an RNA-duplex, the targeter molecule can be DNA in the targeting segment and RNA in the duplex-forming segment. In some cases, hybrid Cas9 guide RNAs can bias Cas9 binding to single stranded target nucleic acids relative to double stranded target nucleic acids.

### Stability Control Sequence (e.g., Transcriptional Terminator Segment)

[0481] In some embodiments, a Cas9 guide RNA comprises a stability control sequence. A stability control sequence influences the stability of a nucleic acid (e.g., a Cas9 guide RNA, a targeter, an activator, etc.). One example of a suitable stability control sequence for use with an RNA is a transcriptional terminator segment (i.e., a transcription termination sequence). A transcriptional terminator segment of a subject Cas9 guide RNA can have a total length of from about 10 nucleotides to about 100 nucleotides, e.g., from about 10 nucleotides (nt) to about 20 nt, from about 20 nt to about 30 nt, from about 30 nt to about 40 nt, from about 40 nt to about 50 nt, from about 50 nt to about 60 nt, from about 60 nt to about 70 nt, from about 70 nt to about 80 nt, from about 80 nt to about 90 nt, or from about 90 nt to about 100 nt. For example, the transcriptional terminator segment can have a length of from about 15 nucleotides (nt) to about 80 nt, from about 15 nt to about 50 nt, from about 15 nt to about 40 nt, from about 15 nt to about 30 nt or from about 15 nt to about 25 nt.

[0482] In some cases, the transcription termination sequence is one that is functional in a eukaryotic cell. In some cases, the transcription termination sequence is one that is functional in a prokaryotic cell.

[0483] Non-limiting examples of nucleotide sequences that can be included in a stability control sequence (e.g., transcriptional termination segment, or in any segment of the Cas9 guide RNA to provide for increased stability) include sequences set forth in SEQ ID NOs: 683-696 and, for example,

5′-UAAUCCCACAGCCGCCAGUUCCGCUGGCGGCAUUUU-5′ (SEQ ID NO: 1349) (a Rho-independent trp termination site).

### Additional Sequences

[0484] In some embodiments, a Cas9 guide RNA comprises an additional segment or segments (in some cases at the 5′ end, in some cases the 3′ end, in some cases at either the 5′ or 3′ end, in some cases embedded within the sequence (i.e., not at the 5′ and/or 3′ end), in some cases at both the 5′ end and the 3′ end, in some cases embedded and at the 5′ end and/or the 3′ end, etc.). For example, a suitable additional segment can comprise a 5′ cap (e.g., a 7-methylguanylate cap (m⁷G)); a 3′ polyadenylated tail (i.e., a 3′ poly(A) tail); a ribozyme sequence (e.g. to allow for self-cleavage of a Cas9 guide RNA (or component of a Cas9 guide RNA, e.g., a targeter, an activator, etc.) and release of a mature PAMmer in a regulated fashion); a riboswitch sequence (e.g., to allow for regulated stability and/or regulated accessibility by proteins and protein complexes); a sequence that forms a dsRNA duplex (i.e., a hairpin)); a sequence that targets an RNA to a subcellular location (e.g., nucleus, mitochondria, chloroplasts, and the like); a modification or sequence that provides for tracking (e.g., a direct label (e.g., direct conjugation to a fluorescent molecule (i.e., fluorescent dye)), conjugation to a moiety that facilitates fluorescent detection, a sequence that allows for fluorescent detection; a modification or sequence that provides a binding site for proteins (e.g., proteins that act on DNA, including transcriptional activators, transcriptional repressors, DNA methyltransferases, DNA demethylases, histone acetyltransferases, histone deacetylases, proteins that bind RNA (e.g., RNA aptamers), labeled proteins, fluorescently labeled proteins, and the like); a modification or sequence that provides for increased, decreased, and/or controllable stability; and combinations thereof.

[0485] Examples of various Cas9 guide RNAs can be found in the art, for example, see Jinek et al., Science. 2012 Aug. 17; 337(6096):816-21; Chylinski et al., RNA Biol. 2013 May; 10(5):726-37; Ma et al., Biomed Res Int. 2013; 2013:270805; Hou et al., Proc Natl Acad Sci USA. 2013 Sep. 24; 110(39):15644-9; Jinek et al., Elife. 2013; 2:e00471; Pattanayak et al., Nat Biotechnol. 2013 September; 31(9):839-43; Qi et al, Cell. 2013 Feb. 28; 152(5):1173-83; Wang et al., Cell. 2013 May 9; 153(4):910-8; Auer et. al., Genome Res. 2013 Oct. 31; Chen et. al., Nucleic Acids Res. 2013 Nov. 1; 41(20):e19; Cheng et. al., Cell Res. 2013 October; 23(10):1163-71; Cho et. al., Genetics. 2013 November; 195(3):1177-80; DiCarlo et al., Nucleic Acids Res. 2013 April; 41(7):4336-43; Dickinson et. al., Nat Methods. 2013 October; 10(10):1028-34; Ebina et. al., Sci Rep. 2013; 3:2510; Fujii et. al, Nucleic Acids Res. 2013 Nov. 1; 41(20):e187; Hu et. al., Cell Res. 2013 November; 23(11):1322-5; Jiang et. al., Nucleic Acids Res. 2013 Nov. 1; 41(20):e188; Larson et. al., Nat Protoc. 2013 November; 8(11):2180-96; Mali et. al., Nat Methods. 2013 October; 10(10):957-63; Nakayama et. al., Genesis. 2013 December; 51(12):835-43; Ran et. al., Nat Protoc. 2013 November; 8(11):2281-308; Ran et. al., Cell. 2013 Sep. 12; 154(6):1380-9; Upadhyay et. al., G3 (Bethesda). 2013 Dec. 9; 3(12):2233-8; Walsh et. al., Proc Natl Acad Sci USA. 2013 Sep. 24; 110(39):15514-5; Xie et. al., Mol Plant. 2013 Oct. 9; Yang et. al., Cell. 2013 Sep. 12; 154(6):1370-9; Briner et al., Mol Cell. 2014 Oct. 23; 56(2):333-9; and U.S. patents and patent applications: U.S. Pat. Nos. 8,906,616; 8,895,308; 8,889,418; 8,889,356; 8,871,445; 8,865,406; 8,795,965; 8,771,945; 8,697,359; 20140068797; 20140170753; 20140179006; 20140179770; 20140186843; 20140186919; 20140186958; 20140189896; 20140227787; 20140234972; 20140242664; 20140242699; 20140242700; 20140242702; 20140248702; 20140256046; 20140273037; 20140273226; 20140273230; 20140273231; 20140273232; 20140273233; 20140273234; 20140273235; 20140287938; 20140295556; 20140295557; 20140298547; 20140304853; 20140309487; 20140310828; 20140310830; 20140315985; 20140335063; 20140335620; 20140342456; 20140342457; 20140342458; 20140349400; 20140349405; 20140356867; 20140356956; 20140356958; 20140356959; 20140357523; 20140357530; 20140364333; and 20140377868; all of which are hereby incorporated by reference in their entirety.

### Donor Polynucleotide

[0486] In some cases, the contacting of target nucleic acid (e.g., via introduction into a cell of components described herein) (e.g., with a Cas9 protein, e.g., a subject variant Cas9 protein) occurs under conditions that are permissive for nonhomologous end joining or homology-directed repair. In some cases, the method further comprises contacting the target nucleic acid (e.g., target DNA) with a donor polynucleotide, where the donor polynucleotide, a portion of the donor polynucleotide, a copy of the donor polynucleotide, or a portion of a copy of the donor polynucleotide integrates into the target nucleic acid (i.e., a sequence of a donor polynucleotide integrates into the target nucleic acid, e.g., target DNA). In some cases, the method does not include a donor polynucleotide and the target nucleic acid (e.g., target DNA) is modified such that nucleotides within the target nucleic acid are deleted.

[0487] In some cases, Cas9 guide RNA, a Cas9 protein (e.g., a subject variant Cas9 protein), and/or a PAMmer are co-administered (e.g., contacted with a target nucleic acid, introduced into a cell, etc.) with a donor polynucleotide having a sequence that includes at least a segment with homology to the target nucleic acid sequence (e.g., target DNA sequence). The subject methods may be used to add, i.e. insert or replace, nucleic acid material to a target nucleic acid sequence (target DNA sequence) (e.g. to “knock in” a nucleic acid that encodes for a protein, an siRNA, an miRNA, etc.), to add a tag (e.g., 6×His, a fluorescent protein (e.g., a green fluorescent protein; a yellow fluorescent protein, etc.), hemagglutinin (HA), FLAG, etc.), to add a regulatory sequence to a gene (e.g. promoter, polyadenylation signal, internal ribosome entry sequence (IRES), 2A peptide, start codon, stop codon, splice signal, localization signal, etc.), to modify a nucleic acid sequence (e.g., introduce a mutation), and the like. As such, a complex comprising a Cas9 guide RNA and a Cas9 protein (e.g., a subject variant Cas9 protein) (and/or a PAMmer and/or a donor polynucleotide) is useful in any in vitro or in vivo application in which it is desirable to modify a target nucleic acid (e.g., target DNA) in a site-specific, i.e. “targeted”, way, for example gene knock-out, gene knock-in, gene editing, gene tagging, etc., as used in, for example, gene therapy, e.g. to treat a disease or as an antiviral, antipathogenic, or anticancer therapeutic, the production of genetically modified organisms in agriculture, the large scale production of proteins by cells for therapeutic, diagnostic, or research purposes, the induction of iPS cells, biological research, the targeting of genes of pathogens for deletion or replacement, etc.

[0488] In applications in which it is desirable to insert a polynucleotide sequence into a target nucleic acid (e.g., target DNA, e.g., genomic DNA), a polynucleotide comprising a donor sequence to be inserted can also be provided to the cell. By a “donor sequence” or “donor polynucleotide” it is meant a nucleic acid sequence to be inserted at the cleavage site induced by a Cas9 protein (e.g., a subject variant Cas9 protein). The donor polynucleotide will contain sufficient homology to a region of the target nucleic acid (e.g., target DNA, e.g., genomic DNA) at the cleavage site, e.g. 70%, 80%, 85%, 90%, 95%, or 100% homology with the nucleotide sequences flanking the cleavage site, e.g. within about 50 bases or less of the cleavage site, e.g. within about 30 bases, within about 15 bases, within about 10 bases, within about 5 bases, or immediately flanking the cleavage site, to support homology-directed repair between it and the target nucleic acid (e.g., target DNA, e.g., genomic DNA) sequence to which it bears homology. Approximately 25, 50, 100, or 200 nucleotides, or more than 200 nucleotides, of sequence homology between a donor and a target nucleic acid (e.g., target DNA, e.g., genomic DNA) sequence (e.g., genomic sequence) (or any integral value between 10 and 200 nucleotides, or more) will support homology-directed repair. Donor sequences can be of any length, e.g. 10 nucleotides or more, 50 nucleotides or more, 100 nucleotides or more, 250 nucleotides or more, 500 nucleotides or more, 1000 nucleotides or more, 5000 nucleotides or more, etc.

[0489] The donor sequence is typically not identical to the target sequence that it replaces. Rather, the donor sequence can contain, with respect to the target nucleic acid (e.g., target DNA, e.g., genomic DNA) sequence, one or more of: a substitution, an insertion, a deletion, an inversion, and a rearrangement, so long as sufficient homology is present to support homology-directed repair. In some embodiments, the donor sequence includes a non-homologous sequence flanked by two regions of homology, such that homology-directed repair between the target nucleic acid (e.g., target DNA, e.g., genomic DNA) region and the two flanking sequences results in insertion of the non-homologous sequence at the target region. Donor sequences may also include a vector backbone containing sequences that are not homologous to the target nucleic acid (e.g., target DNA, e.g., genomic DNA) region of interest and that are not intended for insertion into the target nucleic acid region of interest. Generally, the homologous region(s) of a donor sequence will have at least 50% sequence identity to a genomic sequence with which recombination is desired. In certain embodiments, 60%, 70%, 80%, 90%, 95%, 98%, 99%, or 99.9% sequence identity is present. Any value between 1% and 100% sequence identity can be present, depending upon the length of the donor polynucleotide.

[0490] The donor sequence may include certain sequence differences as compared to the target nucleic acid (e.g., target DNA, e.g., genomic DNA) sequence, e.g. restriction sites, nucleotide polymorphisms, selectable markers (e.g., drug resistance genes, fluorescent proteins, enzymes etc.), etc., which may be used to assess for successful insertion of the donor sequence at the cleavage site or in some cases may be used for other purposes (e.g., to signify expression at the targeted genomic locus). In some cases, if located in a coding region, such nucleotide sequence differences will not change the amino acid sequence, or will make silent amino acid changes (i.e., changes which do not affect the structure or function of the protein). Alternatively, these sequences differences may include flanking recombination sequences such as FLPs, loxP sequences, or the like, that can be activated at a later time for removal of the marker sequence.

[0491] The donor sequence can be contacted with the target nucleic acid (e.g., provided to the cell) as single-stranded DNA, single-stranded RNA, double-stranded DNA, or double-stranded RNA. It may be contacted (e.g., introduced into a cell) in linear or circular form. If contacted (e.g., introduced) in linear form, the ends of the donor sequence may be protected (e.g., from exonucleolytic degradation) by methods known to those of skill in the art. For example, one or more dideoxynucleotide residues can be added to the 3′ terminus of a linear molecule and/or self-complementary oligonucleotides can be ligated to one or both ends. See, for example, Chang et al. (1987) Proc. Natl. Acad Sci USA 84:4959-4963; Nehls et al. (1996) Science 272:886-889. Additional methods for protecting exogenous polynucleotides from degradation include, but are not limited to, addition of terminal amino group(s) and the use of modified internucleotide linkages such as, for example, phosphorothioates, phosphoramidates, and O-methyl ribose or deoxyribose residues. As an alternative to protecting the termini of a linear donor sequence, additional lengths of sequence may be included outside of the regions of homology that can be degraded without impacting recombination. A donor sequence can be introduced into a cell as part of a vector molecule having additional sequences such as, for example, replication origins, promoters and genes encoding antibiotic resistance. Moreover, donor sequences can be introduced as naked nucleic acid, as nucleic acid complexed with an agent such as a liposome or poloxamer, or can be delivered by viruses (e.g., adenovirus, AAV), as described herein for nucleic acids encoding a subject variant Cas9 protein and/or a Cas9 guide RNA (e.g., a subject variant Cas9 protein).

### PAMmer

[0492] In some cases, e.g., when a target nucleic acid is single stranded, a PAMmer can be used to provide a PAM sequence. PAMmers can be present in subject compositions, systems, kits, and/or methods.

[0493] A “PAMmer” is a single stranded oligonucleotide (e.g., DNA, RNA, a modified nucleic acid, etc.) that hybridizes to a single stranded target nucleic acid (thus converting the single stranded target nucleic acid into a double stranded target nucleic acid at a desired position), and provides a protospacer adjacent motif (PAM) sequence. For information regarding PAMmers in addition to the discussion below, see, for example, O'Connell et al., Nature. 2014 Dec. 11; 516(7530):263-6; and Sternberg et. al., Nature. 2014 Mar. 6; 507(7490):62-7; both of which are hereby incorporated by reference in their entirety.

[0494] A PAMmer includes a PAM sequence and at least one of: an orientation segment (which is positioned 3′ of the PAM sequence), and a specificity segment (which is positioned 5′ of the PAM sequence). A specificity segment has a nucleotide sequence that is complementary to a first target nucleotide sequence in a target nucleic acid (i.e., the sequence that is targeted by the specificity segment), where the first target nucleotide sequence overlaps (in some cases 100%) with the sequence targeted by the targeting segment of the guide nucleic acid. In other words, the specificity segment is complementary with (and hybridizes to) the target site of the target nucleic acid.

[0495] In some cases, a PAMmer having a specificity segment is referred to herein as a “5′ extended PAMmer.” The term “5′ extended PAMmer” refers to a situation in which a PAMmer includes nucleotides 5′ of the PAM sequence. The term “5′ extended PAMmer” encompasses a PAMmer having a specificity segment, but also encompasses a PAMmer that has nucleotides 5′ of the PAM sequence that do not constitute a specificity segment. Thus, in some cases, the nucleotides that are 5′ of the PAM sequence constitute a specificity segment (i.e., the nucleotides hybridize to the target nucleic acid)(see below for a more detailed discussion regarding a specificity segment), and in some cases, a PAMmer has nucleotides that are 5′ of the PAM sequence that do not constitute a specificity segment (do not hybridize with the target nucleic acid).

[0496] An orientation segment has a nucleotide sequence that is complementary to a second target nucleotide sequence in a target nucleic acid (i.e., the sequence that is targeted by the orientation segment). In some cases, a subject PAMmer includes a PAM sequence and an orientation segment, but does not include a specificity segment. In some cases, a subject PAMmer includes a PAM sequence and a specificity segment, but does not include an orientation segment.

[0497] In some cases, a subject PAMmer includes a PAM sequence, an orientation segment, and a specificity segment. The number of nucleotides (nt) present in the PAMmer between a specificity segment and an orientation segment can depend on a number of factors that include, but are not limited to: the length of the PAM sequence (which is present between the specificity segment and the orientation segment); the number of nucleotides present between the target site and the orientation site of the target nucleic acid; the presence or absence of additional sequences (e.g., aptamers, protein binding sequences, linker nucleotides, stability sequences, etc.) between the specificity segment and the orientation segment; etc. In some embodiments, the number of nucleotides (nt) present in the PAMmer between a specificity segment and an orientation segment is in a range of from 2 nt to 100 nt (e.g., 2 nt to 90 nt, 2 nt to 80 nt, 2 nt to 70 nt, 2 nt to 60 nt, 2 nt to 50 nt, 2 nt to 40 nt, 2 nt to 30 nt, 2 nt to 25 nt, 2 nt to 20 nt, 2 nt to 15 nt, or 2 nt to 10 nt). In some embodiments, the number of nucleotides (nt) present in the PAMmer between the specificity segment and the orientation segment is 100 nt or less (e.g., 90 nt or less, 80 nt or less, 70 nt or less, 60 nt or less, 50 nt or less, 40 nt or less, 30 nt or less, 25 nt or less, 25 nt or less, 20 nt or less, 15 nt or less, or 10 nt or less).

[0498] In some embodiments, the PAM sequence is immediately adjacent to the orientation segment, immediately adjacent to the specificity segment, and/or immediately adjacent to both the orientation segment and the specificity segment. In some embodiments, the number of nucleotides (nt) present in the PAMmer between the PAM sequence and the specificity segment of the PAMmer is in a range of from 0 nt to 10 nt (e.g., 0 nt to 9 nt, 0 nt to 8 nt, 0 nt to 7 nt, 0 nt to 6 nt, 0 nt to 5 nt, 0 nt to 4 nt, 0 nt to 3 nt, 1 nt to 9 nt, 1 nt to 8 nt, 1 nt to 7 nt, 1 nt to 6 nt, 1 nt to 5 nt, 1 nt to 4 nt, 1 nt to 3 nt, 2 nt to 9 nt, 2 nt to 8 nt, 2 nt to 7 nt, 2 nt to 6 nt, 2 nt to 5 nt, 2 nt to 4 nt, or 2 nt to 3 nt). In some embodiments, 10 or less nt (e.g., 9 or less nt, 8 or less nt, 7 or less nt, 6 or less nt, 5 or less nt, 4 or less nt, 3 or less nt, 2 or less nt, 1 or less nt, or no nt) are present in the PAMmer between the PAM sequence and the specificity segment. In some embodiments, the number of nucleotides (nt) present in the PAMmer between the PAM sequence and the orientation segment of the PAMmer is in a range of from 0 nt to 10 nt (e.g., 0 nt to 9 nt, 0 nt to 8 nt, 0 nt to 7 nt, 0 nt to 6 nt, 0 nt to 5 nt, 0 nt to 4 nt, 0 nt to 3 nt, 1 nt to 9 nt, 1 nt to 8 nt, 1 nt to 7 nt, 1 nt to 6 nt, 1 nt to 5 nt, 1 nt to 4 nt, 1 nt to 3 nt, 2 nt to 9 nt, 2 nt to 8 nt, 2 nt to 7 nt, 2 nt to 6 nt, 2 nt to 5 nt, 2 nt to 4 nt, or 2 nt to 3 nt). In some embodiments, 10 or less nt (e.g., 9 or less nt, 8 or less nt, 7 or less nt, 6 or less nt, 5 or less nt, 4 or less nt, 3 or less nt, 2 or less nt, 1 or less nt, or no nt) are present in the PAMmer between the PAM sequence and the orientation segment.

[0499] In some embodiments, a PAMmer has a length (e.g., the PAM sequence and the orientation segment have a combined length) in a range of from 2 nt to 100 nt (e.g., 2 nt to 70 nt, 2 nt to 50 nt, 2 nt to 45 nt, 2 nt to 40 nt, 2 nt to 35 nt, 2 nt to 30 nt, 2 nt to 25 nt, 2 nt to 20 nt, 2 nt to 10 nt, 2 nt to 5 nt, 3 nt to 70 nt, 3 nt to 50 nt, 3 nt to 45 nt, 3 nt to 40 nt, 3 nt to 35 nt, 3 nt to 30 nt, 3 nt to 25 nt, 3 nt to 20 nt, 3 nt to 10 nt, 3 nt to 5 nt, 5 nt to 70 nt, 5 nt to 50 nt, 5 nt to 45 nt, 5 nt to 40 nt, 5 nt to 35 nt, 5 nt to 30 nt, 5 nt to 25 nt, 5 nt to 20 nt, 10 nt to 70 nt, 10 nt to 50 nt, 10 nt to 45 nt, 10 nt to 40 nt, 10 nt to 35 nt, 10 nt to 30 nt, 10 nt to 25 nt, 10 nt to 20 nt, 10 nt to 15 nt, 15 nt to 70 nt, 15 nt to 50 nt, 15 nt to 45 nt, 15 nt to 40 nt, 15 nt to 35 nt, 15 nt to 30 nt, 15 nt to 25 nt, or 15 nt to 20 nt).

[0500] In some cases, a PAMmer is a DNA molecule. In some cases, a PAMmer is an RNA molecule. In some cases, a PAMmer is a hybrid DNA/RNA molecule (e.g., in some cases, at least the PAM sequence of the PAMmer is DNA). In some cases the PAMmer has one or more modified nucleic acids (described in more detail below with respect to nucleic acid modifications). In some embodiments, a subject PAMmer has one or more nucleotides that are 2′-O-Methyl modified nucleotides. In some embodiments, a subject PAMmer has one or more 2′ Fluoro modified nucleotides. In some embodiments, a subject PAMmer has one or more LNA bases. In some embodiments, a subject PAMmer has one or more nucleotides that are linked by a phosphorothioate bond (i.e., the subject nucleic acid has one or more phosphorothioate linkages). In some embodiments, a subject PAMmer has a 5′ cap (e.g., a 7-methylguanylate cap (m7G)). In some embodiments, a subject PAMmer has a combination of modified nucleotides. For example, a subject PAMmer can have a 5′ cap (e.g., a 7-methylguanylate cap (m7G)) in addition to having one or more nucleotides with other modifications (e.g., a 2′-O-Methyl nucleotide and/or a 2′ Fluoro modified nucleotide and/or a LNA base and/or a phosphorothioate linkage).

### PAM Sequence

[0501] A wild type Cas9 protein normally has nuclease activity that cleaves a target nucleic acid (e.g., a double stranded DNA (dsDNA)) at a target site defined by the region of complementarity between the targeting segment of the guide nucleic acid and the target nucleic acid. In some cases, site-specific modification (e.g., cleavage) of a target nucleic acid occurs at locations determined by both (i) base-pairing complementarity between the guide nucleic acid and the target nucleic acid; and (ii) a short motif referred to as the protospacer adjacent motif (PAM) in the target nucleic acid. When a Cas9 protein binds to (in some cases cleaves) a dsDNA target nucleic acid, the PAM sequence that is recognized (bound) by the Cas9 protein is present on the non-complementary strand (the strand that does not hybridize with the targeting segment of the guide nucleic acid) of the target nucleic acid (e.g., target DNA). Thus, when a Cas9 protein binds to (in some cases cleaves) a single stranded target nucleic acid, no PAM sequence is present because there is no non-complementary strand. A subject PAMmer provides a PAM sequence, which is positioned near the target site (the sequence targeted by the targeting segment of the guide nucleic acid) by the orientation segment and/or the specificity segment of the PAMmer.

[0502] In some embodiments, the PAM sequence of the PAMmer is complementary to (i.e., hybridizes with) the target nucleic acid. In some embodiments, the PAM sequence of the PAMmer is not complementary to (i.e., does not hybridize with) the target nucleic acid. In some embodiments, a PAM sequence of a PAMmer has a length in a range of from 1 nt to 15 nt (e.g., 1 nt to 14 nt, 1 nt to 13 nt, 1 nt to 12 nt, 1 nt to 11 nt, 1 nt to 10 nt, 1 nt to 9 nt, 1 nt to 9 nt, 1 nt to 8 nt, 1 nt to 7 nt, 1 nt to 6 nt, 1 nt to 5 nt, 1 nt to 4 nt, 1 nt to 3 nt, 2 nt to 15 nt, 2 nt to 14 nt, 2 nt to 13 nt, 2 nt to 12 nt, 2 nt to 11 nt, 2 nt to 10 nt, 2 nt to 9 nt, 2 nt to 8 nt, 2 nt to 7 nt, 2 nt to 6 nt, 2 nt to 5 nt, 2 nt to 4 nt, 2 nt to 3 nt, 2 nt, or 3 nt).

[0503] In some embodiments, e.g., when a Cas9 protein (e.g., a subject variant Cas9 protein) is derived from S. pyogenes or a closely related Cas9 is used (see for example, Chylinski et al., RNA Biol. 2013 May; 10(5):726-37; and Jinek et al., Science. 2012 Aug. 17; 337(6096):816-21; both of which are hereby incorporated by reference in their entirety), a PAM sequence (e.g., of a target nucleic acid, of a PAMmer, etc.) can be GG (5′-GG-3′), or can be 5′-NGG-3′, where N is any nucleotide. In some embodiments (e.g., when a Cas9 protein (e.g., a subject variant Cas9 protein) is derived from the Cas9 protein of Neisseria meningitidis or a closely related Cas9 is used), the PAM sequence (e.g., of a target nucleic acid, of a PAMmer, etc.) can be 5′-NNNNGANN-3′,5′-NNNNGTTN-3′,5′-NNNNGNNT-3′,5′-NNNNGTNN-3′,5′-NNNNGNTN-3′, or 5′-NNNNGATT-3′, where N is any nucleotide. In some embodiments (e.g., when a Cas9 protein (e.g., a subject variant Cas9 protein) is derived from Streptococcus thermophilus #1 or a closely related Cas9 is used), the PAM sequence (e.g., of a target nucleic acid, of a PAMmer, etc.) can be 5′-NNAGAA-3′,5′-NNAGGA-3′,5′-NNGGAA-3′, 5′-NNANAA-3′, or 5′-NNGGGA-3′ where N is any nucleotide. In some embodiments (e.g., when a Cas9 protein (e.g., a subject variant Cas9 protein) is derived from Treponema denticola (TD) or a closely related Cas9 is used), the PAM sequence (e.g., of a target nucleic acid, of a PAMmer, etc.) can be 5′-NAAAAN-3′,5′-NAAAAC-3′,5′-NAAANC-3′, 5′-NANAAC-3′, or 5′-NNAAAC-3′, where N is any nucleotide. As would be known by one of ordinary skill in the art, additional PAM sequences for other Cas9 polypeptides can readily be determined using bioinformatic analysis (e.g., analysis of genomic sequencing data). See Esvelt et al., Nat Methods. 2013 November; 10(11):1116-21, for additional information. Thus, in some cases a target nucleic acid has a PAM sequence and the Cas9 guide RNA hybridizes to a sequence that adjacent to the PAM sequence.

[0504] Also as known in the art, the PAM-interacting domain can be derived from a Cas9 protein from a first species, and the PAM sequence can correspond to that domain. Thus, in some cases, a subject Cas9 protein (e.g., a subject variant Cas9 protein) has a PAM-interacting domain that is derived from a Cas9 protein of a first species, and other portions of the Cas9 protein (e.g., a subject variant Cas9 protein) (e.g., the rest of the Cas9 protein) can be derived from the Cas9 protein of a second species.

### Specificity Segment

[0505] A specificity segment can be present or absent in a subject PAMmer (the PAMmer has a specificity segment, an orientation segment, or both a specificity segment and an orientation segment), and when present, the specificity segment is positioned 5′ of the PAM sequence. As noted above, in some cases, a PAMmer having a specificity segment is referred to herein as a “5′-extended PAMmer.” The specificity segment hybridizes to (i.e., targets) a sequence of a target nucleic that overlaps with the target site such that the PAM sequence is positioned near the target site (i.e., the sequence of the target nucleic acid that is targeted by the targeting segment of the guide nucleic acid). Thus, the PAMmer provides a PAM sequence at any desired location within a target nucleic acid (e.g., by designing the specificity segment of the PAMmer to hybridize to any desired nucleotide sequence of the target nucleic acid).

[0506] In cases where a PAMmer is used in a method of cleavage, the targeting segment of the guide nucleic acid (which associates with a Cas9 protein, e.g., a subject variant Cas9 protein) is complementary to the target nucleic acid, and this is true whether or not the PAMmer has a specificity segment. In cases where a PAMmer is used in a method of binding, the targeting segment of the guide nucleic acid (which associates with a Cas9 protein, e.g., a subject variant Cas9 protein) is complementary to the target nucleic acid when the PAMmer has a specificity segment, but the targeting segment of the guide nucleic acid need not be complementary to the target nucleic acid when the PAMmer does not have a specificity segment (i.e., when the PAMmer has PAM sequence and an orientation segment, but not a specificity segment).

[0507] A specificity segment can have a length of from 3 nucleotides (nt) to 100 nt (e.g., from 3 nt to 80 nt, from 3 nt to 50 nt, from 3 nt to 40 nt, from 5 nt to 40 nt, from 5 nt to 35 nt, from 5 nt to 30 nt, from 5 nt to 25 nt, from 10 nt to 40 nt, from 10 nt to 35 nt, from 10 nt to 30 nt, from 10 nt to 25 nt, from 10 nt to 20 nt, from 12 nt to 40 nt, from 12 nt to 35 nt, from 12 nt to 30 nt, from 12 nt to 25 nt, from 12 nt to 20 nt, from 15 nt to 40 nt, from 15 nt to 35 nt, from 15 nt to 30 nt, from 15 nt to 25 nt, from 15 nt to 20 nt, from 17 nt to 40 nt, from 17 nt to 35 nt, from 17 nt to 30 nt, from 17 nt to 25 nt, from 17 nt to 20 nt, from 18 nt to 40 nt, from 18 nt to 35 nt, from 18 nt to 30 nt, from 18 nt to 25 nt, from 18 nt to 20 nt, from 20 nt to 40 nt, from 20 nt to 35 nt, from 20 nt to 30 nt, or from 20 nt to 25 nt). In some cases, the specificity segment is 20 nucleotides in length. In some cases, the specificity segment is 19 nucleotides in length.

[0508] The percent complementarity between the specificity segment and the sequence of the target nucleic acid targeted by the specificity segment (e.g., the target site, i.e., the site targeted by the targeting segment of the guide nucleic acid) can be 60% or more (e.g., 65% or more, 70% or more, 75% or more, 80% or more, 85% or more, 90% or more, 95% or more, 97% or more, 98% or more, 99% or more, or 100%). In some cases, the percent complementarity between the specificity segment and the sequence of the target nucleic acid targeted by the specificity segment is 60% or more (e.g., 65% or more, 70% or more, 75% or more, 80% or more, 85% or more, 90% or more, 95% or more, 97% or more, 98% or more, 99% or more, or 100%) over about 10 to 30 contiguous nucleotides (nt) (e.g. 15 to 30 contiguous nt, 15 to 25 contiguous nt, 17 to 30 contiguous t, 17 to 25 contiguous t, or 18 to 22 contiguous nt). In some cases, the percent complementarity between the specificity segment and the sequence of the target nucleic acid targeted by the specificity segment is 60% or more (e.g., 65% or more, 70% or more, 75% or more, 80% or more, 85% or more, 90% or more, 95% or more, 97% or more, 98% or more, 99% or more, or 100%) over 10 or more contiguous nucleotides (nt) (e.g. 12 or more contiguous nt, 15 or more contiguous nt, 17 or more contiguous nt, 18 or more contiguous nt, 19 or more contiguous nt, or 20 or more contiguous nt).

[0509] In some cases, the sequence targeted by the specificity segment of a PAMmer is 100% identical to the target site (i.e., the sequence targeted by the targeting segment of the guide nucleic acid). However, the sequence targeted by the specificity segment of a PAMmer need not be 100% identical to the target site. For example, in some cases, the sequence targeted by the specificity segment of a PAMmer overlaps with the sequence targeted by the targeting segment of the guide nucleic acid, but the overlap is not 100%. For example, the sequence targeted by the specificity segment of a PAMmer can be a subset of the target site. In some cases, the sequence targeted by the specificity segment of a PAMmer is shorter than the sequence targeted by the targeting segment of the guide nucleic acid. In some cases, the sequence targeted by the specificity segment of a PAMmer is longer than the sequence targeted by the targeting segment of the guide nucleic acid. In some cases, the sequence targeted by the specificity segment of a PAMmer is the same length as the sequence targeted by the targeting segment of the guide nucleic acid.

[0510] In some cases, the sequence targeted by the specificity segment of a PAMmer shares 2 nucleotides (nt) or more with the sequence targeted by the targeting segment of the guide nucleic acid (e.g., 3 nt or more, 5 nt or more, 8 nt or more, 10 nt or more, 12 nt or more, 15 nt or more, 18 nt or more, etc.). In some cases, the sequence targeted by the specificity segment of a PAMmer shares 2 nucleotides (nt) to 30 nt with the sequence targeted by the targeting segment of the guide nucleic acid (e.g., 5 nt to 30 nt, 5 nt to 25 nt, 5 nt to 22 nt, 8 nt to 30 nt, 8 nt to 25 nt, 8 nt to 22 nt, 8 nt to 20 nt, 10 nt to 30 nt, 10 nt to 25 nt, 10 nt to 22 nt, 10 nt to 20 nt, 12 nt to 30 nt, 12 nt to 25 nt, 12 nt to 22 nt, 12 nt to 20 nt, 15 nt to 30 nt, 15 nt to 25 nt, 15 nt to 22 nt, 15 nt to 20 nt, 18 nt to 30 nt, 18 nt to 25 nt, 18 nt to 22 nt, or 18 nt to 20 nt).

[0511] In some embodiments, a PAMmer has a specificity segment, but does not have an orientation segment (i.e., the PAMmer does not have a nucleotide sequence 3′ of the PAM sequence that hybridizes with the target nucleic acid). In some such cases, the PAM sequence can be at the 3′ end of the PAMmer (i.e., the PAMmer can have 0 nucleotides 3′ of the PAM sequence), or the PAMmer can have 1 or more nucleotides (nt) 3′ of the PAM sequence (e.g., 2 or more nt, 3 or more nt, 4 or more nt, 5 or more nt, 10 or more nt, 15 or more nt, 20 or more nt, etc.), where the nucleotides 3′ of the PAM sequence do not hybridize to the target nucleic acid. In some cases in which a PAMmer does not have an orientation segment, a PAMmer can have a nucleotide sequence, 3′ of the PAM sequence, with a length in a range of from 1 nucleotide (nt) to 20 nt (e.g., from 1 nt to 18 nt, from 1 nt to 16 nt, from 1 nt to 14 nt, from 1 nt to 12 nt, from 1 nt to 10 nt, from 1 nt to 9 nt, from 1 nt to 8 nt, from 1 nt to 7 nt, from 1 nt to 6 nt, from 1 nt to 5 nt, from 1 nt to 4 nt, or from 1 nt to 3 nt), where the nucleotides 3′ of the PAM sequence do not hybridize to the target nucleic acid. For example, if a PAMmer has nucleotides 3′ of the PAM sequence that do hybridize to the target nucleic acid, then the nucleotides that hybridize would be considered an (or part of an) orientation segment.

[0512] In some cases, the length of the specificity segment inversely correlates with efficiency of the cleavage reaction and positively correlates with specificity (i.e., reduction of off-target effects). Thus, there can be a trade-off between the desired level of cleavage and the desired level of specificity. The presence (as well as the length) of a specificity segment can be determined based on the particular target nucleic acid, the nature/purpose of the method, and/or the desired outcome. For example, if maximum specificity is desired, but cleavage efficiency is not a concern, then a long specificity segment may be desirable. On the other hand, if maximum cleavage is desired, but specificity is not a concern (e.g., the orientation segment of the PAMmer provides for adequate specificity), then a shorter specificity segment (e.g., no specificity segment) may be desirable.

[0513] For methods of binding, the presence of a specificity segment can increase binding specificity. Not to be bound by theory, it is believed that this is because the specificity segment provides an energetic barrier to binding that can be overcome by the presence of a targeting segment in the guide nucleic acid that has complementarity to (i.e., can hybridize with) that target nucleic acid, thus displacing the specificity segment of the PAMmer.

### Orientation Segment

[0514] An orientation segment can be present or absent in a subject PAMmer (the PAMmer has a specificity segment, an orientation segment, or both a specificity segment and an orientation segment), and when present, the orientation segment is positioned 3′ of the PAM sequence. The orientation segment hybridizes to (i.e., targets) a sequence of a target nucleic (the orientation site) such that the PAM sequence is positioned near the target site (i.e., the sequence of the target nucleic acid that is targeted by the targeting segment of the guide nucleic acid). Thus, the PAMmer provides a PAM sequence at any desired location within a target nucleic acid (e.g., by designing the orientation segment of the PAMmer to hybridize to any desired nucleotide sequence of the target nucleic acid).

[0515] The orientation segment can have a length of from 3 nucleotides (nt) to 100 nt (e.g., from 3 nt to 80 nt, from 3 nt to 50 nt, from 3 nt to 40 nt, from 5 nt to 40 nt, from 5 nt to 35 nt, from 5 nt to 30 nt, from 5 nt to 25 nt, from 10 nt to 40 nt, from 10 nt to 35 nt, from 10 nt to 30 nt, from 10 nt to 25 nt, from 10 nt to 20 nt, from 12 nt to 40 nt, from 12 nt to 35 nt, from 12 nt to 30 nt, from 12 nt to 25 nt, from 12 nt to 20 nt, from 15 nt to 40 nt, from 15 nt to 35 nt, from 15 nt to 30 nt, from 15 nt to 25 nt, from 15 nt to 20 nt, from 17 nt to 40 nt, from 17 nt to 35 nt, from 17 nt to 30 nt, from 17 nt to 25 nt, from 17 nt to 20 nt, from 18 nt to 40 nt, from 18 nt to 35 nt, from 18 nt to 30 nt, from 18 nt to 25 nt, from 18 nt to 20 nt, from 20 nt to 40 nt, from 20 nt to 35 nt, from 20 nt to 30 nt, or from 20 nt to 25 nt). In some cases, the orientation segment is 20 nucleotides in length. In some cases, the orientation segment is 19 nucleotides in length.

[0516] The percent complementarity between the orientation segment and the sequence of the target nucleic acid targeted by the orientation segment can be 60% or more (e.g., 65% or more, 70% or more, 75% or more, 80% or more, 85% or more, 90% or more, 95% or more, 97% or more, 98% or more, 99% or more, or 100%). In some cases, the percent complementarity between the orientation segment and the sequence of the target nucleic acid targeted by the orientation segment is 60% or more (e.g., 65% or more, 70% or more, 75% or more, 80% or more, 85% or more, 90% or more, 95% or more, 97% or more, 98% or more, 99% or more, or 100%) over about 10 to 30 contiguous nucleotides (nt) (e.g. 15 to 30 contiguous nt, 15 to 25 contiguous nt, 17 to 30 contiguous nt, 17 to 25 contiguous nt, or 18 to 22 contiguous nt). In some cases, the percent complementarity between the orientation segment and the sequence of the target nucleic acid targeted by the orientation segment is 60% or more (e.g., 65% or more, 70% or more, 75% or more, 80% or more, 85% or more, 90% or more, 95% or more, 97% or more, 98% or more, 99% or more, or 100%) over 10 or more contiguous nucleotides (nt) (e.g. 12 or more contiguous nt, 15 or more contiguous nt, 17 or more contiguous nt, 18 or more contiguous nt, 19 or more contiguous nt, or 20 or more contiguous nt).

[0517] In some cases, the sequence targeted by the orientation segment of a PAMmer is immediately adjacent to the sequence targeted by the targeting segment of the guide nucleic acid. In some embodiments, 10 or less nt (e.g., 9 or less nt, 8 or less nt, 7 or less nt, 6 or less nt, 5 or less nt, 4 or less nt, 3 or less nt, 2 or less nt, 1 or less nt, or no nt) are present in the target nucleic acid between the sequence targeted by the targeting segment of the guide nucleic acid (i.e., the target site) and the sequence targeted by the orientation segment of the PAMmer. In some cases, the sequence of the target nucleic acid that is targeted by the orientation segment of a PAMmer is within 10 or fewer nucleotides (nt) (e.g., 9 or fewer nt, 8 or fewer nt, 7 or fewer nt, 6 or fewer nt, 5 or fewer nt, 4 or fewer nt, 3 or fewer nt, 2 or fewer nt, 1 or fewer nt, or no nt) of the sequence targeted by the targeting segment of the guide nucleic acid. In some embodiments, the number of nucleotides (nt) present in the target nucleic acid between the sequence targeted by the targeting segment of the guide nucleic acid (i.e., the target site) and the sequence targeted by the orientation segment of the PAMmer is in a range of from 0 nt to 10 nt (e.g., 0 nt to 9 nt, 0 nt to 8 nt, 0 nt to 7 nt, 0 nt to 6 nt, 0 nt to 5 nt, 0 nt to 4 nt, 0 nt to 3 nt, 1 nt to 9 nt, 1 nt to 8 nt, 1 nt to 7 nt, 1 nt to 6 nt, 1 nt to 5 nt, 1 nt to 4 nt, 1 nt to 3 nt, 2 nt to 9 nt, 2 nt to 8 nt, 2 nt to 7 nt, 2 nt to 6 nt, 2 nt to 5 nt, 2 nt to 4 nt, or 2 nt to 3 nt).

[0518] In some cases, a PAMmer has an orientation segment, but does not have a specificity segment (i.e., the PAMmer does not have a nucleotide sequence 5′ of the PAM sequence that hybridizes with the target nucleic acid), but does have an orientation segment. In some such cases, the PAM sequence can be at the 5′ end of the PAMmer (i.e., the PAMmer can have 0 nucleotides 5′ of the PAM sequence), or the PAMmer can have 1 or more nucleotides (nt) 5′ of the PAM sequence (e.g., 2 or more nt, 3 or more nt, 4 or more nt, 5 or more nt, 10 or more nt, 15 or more nt, 20 or more nt, etc.), where the nucleotides 5′ of the PAM sequence do not hybridize to the target nucleic acid. In some cases in which a PAMmer does not have a specificity segment, a PAMmer can have a nucleotide sequence, 5′ of the PAM sequence, with a length in a range of from 1 nucleotide (nt) to 20 nt (e.g., from 1 nt to 18 nt, from 1 nt to 16 nt, from 1 nt to 14 nt, from 1 nt to 12 nt, from 1 nt to 10 nt, from 1 nt to 9 nt, from 1 nt to 8 nt, from 1 nt to 7 nt, from 1 nt to 6 nt, from 1 nt to 5 nt, from 1 nt to 4 nt, or from 1 nt to 3 nt), where the nucleotides 5′ of the PAM sequence do not hybridize to the target nucleic acid. For example, if a PAMmer has nucleotides 5′ of the PAM sequence that do hybridize to the target nucleic acid, then the nucleotides that hybridize would be considered a (or part of a) specificity segment.

[0519] In some cases (e.g., those involving methods of binding, where the PAMmer does not have a specificity segment), the target site of the target nucleic acid can be determined by the orientation segment of the PAMmer and not by the targeting segment of the guide nucleic acid. In some cases, the targeting segment of the guide nucleic acid does not have complementarity to a nucleotide sequence of the target nucleic acid. In some cases, the targeting segment of the guide nucleic acid does not have complementarity to a nucleotide sequence of the target nucleic acid that is near (e.g., within 20 or fewer nucleotides (nt), within 30 or fewer nt, within 40 or fewer t, within 50 or fewer nt, within 60 or fewer nt, within 70 or fewer nt, within 80 or fewer nt, within 90 or fewer nt, or within 100 or fewer nt) the orientation site. However, the orientation segment of the PAMmer still positions the PAM sequence of the PAMmer such that the target nucleic acid can still be bound and/or cleaved by a subject Cas9 protein (e.g., a subject variant Cas9 protein).

### Nucleic Acids

[0520] The present disclosure provides a nucleic acid encoding (i.e., comprising a nucleotide sequence encoding) a subject variant Cas9 protein. In some cases, the nucleic acid also encodes a Cas9 guide RNA (e.g., encodes an activator and a targeter of a dual Cas9 guide RNA, encodes a single guide RNA, etc.). In some cases, the nucleic acid encodes a subject variant Cas9 protein and an activator (e.g., a tracrRNA). In some cases, the nucleic acid encodes a subject variant Cas9 protein and a targeter (e.g., a crRNA, or a duplex-forming segment of a targeter 3′ of an insertion site for inserting a targeting sequence of interest). In some cases, the nucleic acid encodes a subject variant Cas9 protein, an activator (e.g., a tracrRNA), and a targeter (e.g., a crRNA, or a duplex-forming segment of a targeter 3′ of an insertion site for inserting a targeting sequence of interest). In some cases, the nucleic acid encodes a subject variant Cas9 protein and a Cas9 single guide RNA.

[0521] The present disclosure provides a system of one or more nucleic acids encoding (i.e., comprising a nucleotide sequence encoding) a subject variant Cas9 protein. In some cases, the one or more nucleotides encodes a subject variant Cas9 protein and a guide RNA (e.g., encodes an activator RNA and a targeter RNA of a dual Cas9 guide RNA, encodes a single guide RNA, etc.). For example, in some cases, a first nucleic acid encodes a subject variant Cas9 guide RNA and an activator (e.g., a tracrRNA) and a second nucleic acid encodes a targeter (e.g., a crRNA, or a duplex-forming segment of a targeter 3′ of an insertion site for inserting a targeting sequence of interest). In some cases, a first nucleic acid encodes a subject variant Cas9 guide RNA and a targeter (e.g., a crRNA, or a duplex-forming segment of a targeter 3′ of an insertion site for inserting a targeting sequence of interest), while a second nucleic acid encodes an activator (e.g., a tracrRNA). In some cases, a first nucleic acid encodes a subject variant Cas9 protein and a second encodes a Cas9 guide RNA (e.g., encodes an activator and a targeter of a dual Cas9 guide RNA, encodes a single guide RNA, etc.).

[0522] In some embodiments, a nucleic acid encoding a subject variant Cas9 protein is an expression vector, e.g., a recombinant expression vector. In some embodiments, a subject method involves contacting a target nucleic acid or introducing into a cell (or a population of cells) (where the cell comprises a target nucleic acid) one or more nucleic acids comprising nucleotide sequences encoding a subject variant Cas9 protein and a Cas9 guide RNA. In some embodiments a cell comprising a target nucleic acid is in vitro. In some embodiments a cell comprising a target nucleic acid is in vivo. Suitable nucleic acids comprising nucleotide sequences encoding a subject variant Cas9 protein and/or a Cas9 guide RNA include expression vectors, where an expression vector encoding (comprising a nucleotide sequence encoding) a subject variant Cas9 protein and/or a Cas9 guide RNA is a “recombinant expression vector.”

[0523] In some embodiments, the recombinant expression vector is a viral construct, e.g., a recombinant adeno-associated virus construct (see, e.g., U.S. Pat. No. 7,078,387), a recombinant adenoviral construct, a recombinant lentiviral construct, a recombinant retroviral construct, etc.

[0524] Suitable expression vectors include, but are not limited to, viral vectors (e.g. viral vectors based on vaccinia virus; poliovirus; adenovirus (see, e.g., Li et al., Invest Opthalmol Vis Sci 35:2543 2549, 1994; Borras et al., Gene Ther 6:515 524, 1999; Li and Davidson, PNAS 92:7700 7704, 1995; Sakamoto et al., H Gene Ther 5:1088 1097, 1999; WO 94/12649, WO 93/03769; WO 93/19191; WO 94/28938; WO 95/11984 and WO 95/00655); adeno-associated virus (see, e.g., Ali et al., Hum Gene Ther 9:81 86, 1998, Flannery et al., PNAS 94:6916 6921, 1997; Bennett et al., Invest Opthalmol Vis Sci 38:2857 2863, 1997; Jomary et al., Gene Ther 4:683 690, 1997, Rolling et al., Hum Gene Ther 10:641 648, 1999; Ali et al., Hum Mol Genet 5:591 594, 1996; Srivastava in WO 93/09239, Samulski et al., J. Vir. (1989) 63:3822-3828; Mendelson et al., Virol. (1988) 166:154-165; and Flotte et al., PNAS (1993) 90:10613-10617); SV40; herpes simplex virus; human immunodeficiency virus (see, e.g., Miyoshi et al., PNAS 94:10319 23, 1997; Takahashi et al., J Virol 73:7812 7816, 1999); a retroviral vector (e.g., Murine Leukemia Virus, spleen necrosis virus, and vectors derived from retroviruses such as Rous Sarcoma Virus, Harvey Sarcoma Virus, avian leukosis virus, a lentivirus, human immunodeficiency virus, myeloproliferative sarcoma virus, and mammary tumor virus); and the like.

[0525] Numerous suitable expression vectors are known to those of skill in the art, and many are commercially available. The following vectors are provided by way of example; for eukaryotic host cells: pXT1, pSG5 (Stratagene), pSVK3, pBPV, pMSG, and pSVLSV40 (Pharmacia). However, any other vector may be used so long as it is compatible with the host cell.

[0526] Depending on the host/vector system utilized, any of a number of suitable transcription and translation control elements, including constitutive and inducible promoters, transcription enhancer elements, transcription terminators, etc. may be used in the expression vector (see e.g., Bitter et al. (1987) Methods in Enzymology, 153:516-544).

[0527] In some embodiments, a nucleotide sequence (e.g., encoding a subject variant Cas9 protein, encoding a Cas9 guide RNA) is operably linked to a control element, e.g., a transcriptional control element, such as a promoter. The transcriptional control element may be functional (operable) in a cell of interest (e.g., a eukaryotic cell, e.g., a mammalian cell; or a prokaryotic cell, e.g., a bacterial or archaeal cell). In some embodiments, a nucleotide sequence (e.g., encoding a subject variant Cas9 protein, encoding a Cas9 guide RNA) is operably linked to multiple control elements that allow expression of the nucleotide sequence encoding a subject variant Cas9 protein and/or a Cas9 guide RNA in both prokaryotic and eukaryotic cells.

[0528] Non-limiting examples of suitable eukaryotic promoters (promoters functional in a eukaryotic cell) include those from cytomegalovirus (CMV) immediate early, herpes simplex virus (HSV) thymidine kinase, early and late SV40, long terminal repeats (LTRs) from retrovirus, and mouse metallothionein-I. Selection of the appropriate vector and promoter is well within the level of ordinary skill in the art. The expression vector may also contain a ribosome binding site for translation initiation and a transcription terminator. The expression vector may also include appropriate sequences for amplifying expression. The expression vector may also include nucleotide sequences encoding protein tags (e.g., 6×His tag, hemagglutinin tag, green fluorescent protein, etc.) that are fused to the subject variant Cas9 protein, thus resulting in a chimeric polypeptide.

[0529] In some embodiments, a nucleotide sequence encoding a subject variant Cas9 protein and/or a Cas9 guide RNA is operably linked to an inducible promoter. In some embodiments, a nucleotide sequence encoding a subject variant Cas9 protein and/or a Cas9 guide RNA is operably linked to a constitutive promoter.

[0530] A promoter can be a constitutively active promoter (i.e., a promoter that is constitutively in an active/“ON” state), it may be an inducible promoter (i.e., a promoter whose state, active/“ON” or inactive/“OFF”, is controlled by an external stimulus, e.g., the presence of a particular temperature, compound, or protein.), it may be a spatially restricted promoter (i.e., transcriptional control element, enhancer, etc.)(e.g., tissue specific promoter, cell type specific promoter, etc.), and it may be a temporally restricted promoter (i.e., the promoter is in the “ON” state or “OFF” state during specific stages of embryonic development or during specific stages of a biological process, e.g., hair follicle cycle in mice).

[0531] Suitable promoters can be derived from viruses and can therefore be referred to as viral promoters, or they can be derived from any organism, including prokaryotic or eukaryotic organisms. Suitable promoters can be used to drive expression by any RNA polymerase (e.g., pol I, pol II, pol III). Exemplary promoters include, but are not limited to the SV40 early promoter, mouse mammary tumor virus long terminal repeat (LTR) promoter; adenovirus major late promoter (Ad MLP); a herpes simplex virus (HSV) promoter, a cytomegalovirus (CMV) promoter such as the CMV immediate early promoter region (CMVIE), a rous sarcoma virus (RSV) promoter, a human U6 small nuclear promoter (U6) (Miyagishi et al., Nature Biotechnology 20, 497-500 (2002)), an enhanced U6 promoter (e.g., Xia et al., Nucleic Acids Res. 2003 Sep. 1; 31(17)), a human H1 promoter (H1), and the like.

[0532] Examples of inducible promoters include, but are not limited to T7 RNA polymerase promoter, T3 RNA polymerase promoter, Isopropyl-beta-D-thiogalactopyranoside (IPTG)-regulated promoter, lactose induced promoter, heat shock promoter, Tetracycline-regulated promoter, Steroid-regulated promoter, Metal-regulated promoter, estrogen receptor-regulated promoter, etc. Inducible promoters can therefore be regulated by molecules including, but not limited to, doxycycline; RNA polymerase, e.g., T7 RNA polymerase; an estrogen receptor; an estrogen receptor fusion; etc.

[0533] In some embodiments, the promoter is a spatially restricted promoter (i.e., cell type specific promoter, tissue specific promoter, etc.) such that in a multi-cellular organism, the promoter is active (i.e., “ON”) in a subset of specific cells. Spatially restricted promoters may also be referred to as enhancers, transcriptional control elements, control sequences, etc. Any convenient spatially restricted promoter may be used and the choice of suitable promoter (e.g., a brain specific promoter, a promoter that drives expression in a subset of neurons, a promoter that drives expression in the germ line, a promoter that drives expression in the lungs, a promoter that drives expression in muscles, a promoter that drives expression in islet cells of the pancreas, etc.) will depend on the organism. For example, various spatially restricted promoters are known for plants, flies, worms, mammals, mice, etc. Thus, a spatially restricted promoter can be used to regulate the expression of a nucleic acid encoding a Cas9 protein in a wide variety of different tissues and cell types, depending on the organism. Some spatially restricted promoters are also temporally restricted such that the promoter is in the “ON” state or “OFF” state during specific stages of embryonic development or during specific stages of a biological process (e.g., hair follicle cycle in mice).

[0534] For illustration purposes, examples of spatially restricted promoters include, but are not limited to, neuron-specific promoters, adipocyte-specific promoters, cardiomyocyte-specific promoters, smooth muscle-specific promoters, photoreceptor-specific promoters, etc. Neuron-specific spatially restricted promoters include, but are not limited to, a neuron-specific enolase (NSE) promoter (see, e.g., EMBL HSENO2, X51956); an aromatic amino acid decarboxylase (AADC) promoter; a neurofilament promoter (see, e.g., GenBank HUMNFL, L04147); a synapsin promoter (see, e.g., GenBank HUMSYNIB, M55301); a thy-1 promoter (see, e.g., Chen et al. (1987) Cell 51:7-19; and Llewellyn, et al. (2010) Nat. Med. 16(10):1161-1166); a serotonin receptor promoter (see, e.g., GenBank S62283); a tyrosine hydroxylase promoter (TH) (see, e.g., Oh et al. (2009) Gene Ther 16:437; Sasaoka et al. (1992) Mol. Brain Res. 16:274; Boundy et al. (1998) J. Neurosci. 18:9989; and Kaneda et al. (1991) Neuron 6:583-594); a GnRH promoter (see, e.g., Radovick et al. (1991) Proc. Natl. Acad. Sci. USA 88:3402-3406); an L7 promoter (see, e.g., Oberdick et al. (1990) Science 248:223-226); a DNMT promoter (see, e.g., Bartge et al. (1988) Proc. Natl. Acad. Sci. USA 85:3648-3652); an enkephalin promoter (see, e.g., Comb et al. (1988) EMBO J. 17:3793-3805); a myelin basic protein (MBP) promoter; a Ca2+-calmodulin-dependent protein kinase II-alpha (CamKIIα) promoter (see, e.g., Mayford et al. (1996) Proc. Natl. Acad. Sci. USA 93:13250; and Casanova et al. (2001) Genesis 31:37); a CMV enhancer/platelet-derived growth factor-β promoter (see, e.g., Liu et al. (2004) Gene Therapy 11:52-60); and the like.

[0535] Adipocyte-specific spatially restricted promoters include, but are not limited to aP2 gene promoter/enhancer, e.g., a region from −5.4 kb to +21 bp of a human aP2 gene (see, e.g., Tozzo et al. (1997) Endocrinol. 138:1604; Ross et al. (1990) Proc. Natl. Acad. Sci. USA 87:9590; and Pavjani et al. (2005) Nat. Med. 11:797); a glucose transporter-4 (GLUT4) promoter (see, e.g., Knight et al. (2003) Proc. Natl. Acad. Sci. USA 100:14725); a fatty acid translocase (FAT/CD36) promoter (see, e.g., Kuriki et al. (2002) Biol. Pharm. Bull. 25:1476; and Sato et al. (2002) J. Biol. Chem. 277:15703); a stearoyl-CoA desaturase-1 (SCD1) promoter (Tabor et al. (1999) J. Biol. Chem. 274:20603); a leptin promoter (see, e.g., Mason et al. (1998) Endocrinol. 139:1013; and Chen et al. (1999) Biochem. Biophys. Res. Comm 262:187); an adiponectin promoter (see, e.g., Kita et al. (2005) Biochem. Biophys. Res. Comm 331:484; and Chakrabarti (2010) Endocrinol. 151:2408); an adipsin promoter (see, e.g., Platt et al. (1989) Proc. Natl. Acad. Sci. USA 86:7490); a resistin promoter (see, e.g., Seo et al. (2003) Molec. Endocrinol. 17:1522); and the like.

[0536] Cardiomyocyte-specific spatially restricted promoters include, but are not limited to control sequences derived from the following genes: myosin light chain-2, α-myosin heavy chain, AE3, cardiac troponin C, cardiac actin, and the like. Franz et al. (1997) Cardiovasc. Res. 35:560-566; Robbins et al. (1995) Ann. N.Y. Acad. Sci. 752:492-505; Linn et al. (1995) Circ. Res. 76:584-591; Parmacek et al. (1994) Mol. Cell. Biol. 14:1870-1885; Hunter et al. (1993) Hypertension 22:608-617; and Sartorelli et al. (1992) Proc. Natl. Acad. Sci. USA 89:4047-4051.

[0537] Smooth muscle-specific spatially restricted promoters include, but are not limited to an SM22α promoter (see, e.g., Akyürek et al. (2000) Mol. Med. 6:983; and U.S. Pat. No. 7,169,874); a smoothelin promoter (see, e.g., WO 2001/018048); an α-smooth muscle actin promoter; and the like. For example, a 0.4 kb region of the SM22a promoter, within which lie two CArG elements, has been shown to mediate vascular smooth muscle cell-specific expression (see, e.g., Kim, et al. (1997) Mol. Cell. Biol. 17, 2266-2278; Li, et al., (1996) J. Cell Biol. 132, 849-859; and Moessler, et al. (1996) Development 122, 2415-2425).

[0538] Photoreceptor-specific spatially restricted promoters include, but are not limited to, a rhodopsin promoter; a rhodopsin kinase promoter (Young et al. (2003) Ophthalmol. Vis. Sci. 44:4076); a beta phosphodiesterase gene promoter (Nicoud et al. (2007) J. Gene Med. 9:1015); a retinitis pigmentosa gene promoter (Nicoud et al. (2007) supra); an interphotoreceptor retinoid-binding protein (IRBP) gene enhancer (Nicoud et al. (2007) supra); an IRBP gene promoter (Yokoyama et al. (1992) Exp Eye Res. 55:225); and the like.

[0539] In some embodiments, a nucleotide sequence encoding a subject variant Cas9 protein can be codon optimized. Thus, in some cases, a nucleic acid includes a codon-optimized nucleotide sequence that encodes a subject variant Cas9 protein. In some cases, a codon optimized nucleotide sequence encoding a subject variant Cas9 protein encodes a chimeric Cas9 protein (a Cas9 fusion protein) and/or a split Cas9 protein. Codon optimization is known in the art and entails the mutation of foreign-derived DNA to mimic the codon preferences of the intended host organism or host cell while encoding the same protein. Thus, the codons are changed, but the encoded protein remains unchanged. For example, if the intended target and/or host cell was a human cell, a Cas9 protein, or Cas9 variant, encoded by a human codon optimized nucleotide sequence would be a suitable Cas9 protein. As another non-limiting example, if the intended target and/or host cell was a mouse cell, a Cas9 protein, or Cas9 variant, encoded by a mouse codon optimized nucleotide sequence would be a suitable Cas9 protein. While codon optimization is not required, it is acceptable and may be preferable in certain cases.

[0540] Methods of introducing a nucleic acid into a host cell are known in the art, and any known method can be used to introduce a nucleic acid (e.g., an expression construct) into a cell. Suitable methods include e.g., viral or bacteriophage infection, transfection, conjugation, protoplast fusion, lipofection, nucleofection, electroporation, calcium phosphate precipitation, polyethyleneimine (PEI)-mediated transfection, DEAE-dextran mediated transfection, liposome-mediated transfection, particle gun technology, calcium phosphate precipitation, direct micro injection, nanoparticle-mediated nucleic acid delivery (see, e.g., Panyam et., al Adv Drug Deliv Rev. 2012 Sep. 13. pii: 50169-409X(12)00283-9. doi: 10.1016/j.addr.2012.09.023), and the like.

[0541] In some embodiments, a subject variant Cas9 protein and/or a Cas9 guide RNA and/or PAMmer can be provided as RNA. In such cases, the RNA can be produced by direct chemical synthesis or may be transcribed in vitro from a DNA (e.g., encoding the variant Cas9 protein, the Cas9 guide RNA, the PAMmer, etc.). Methods of synthesizing RNA from a DNA template are well known in the art. In some cases, the variant Cas9 protein, the Cas9 guide RNA, and/or the PAMmer will be synthesized in vitro using an RNA polymerase enzyme (e.g., T7 polymerase, T3 polymerase, SP6 polymerase, etc.). Once synthesized, the RNA may directly contact a target nucleic acid or may be introduced into a cell by any of the well-known techniques for introducing nucleic acids into cells (e.g., microinjection, electroporation, nucleofection, transfection, etc). In some cases, a PAMmer is a DNA oligonucleotide and can be produced using any convenient method (e.g., chemical synthesis).

[0542] Nucleotides encoding a Cas9 guide RNA (introduced either as DNA or RNA) and/or a Cas9 protein (introduced as DNA or RNA) and/or a PAMmer (introduced either as DNA or RNA) may be provided to the cells using well-developed transfection techniques; see, e.g. Angel and Yanik (2010) PLoS ONE 5(7): e11756, and the commercially available TransMessenger® reagents from Qiagen, Stemfect™ RNA Transfection Kit from Stemgent, and TransIT®-mRNA Transfection Kit from Mirus Bio LLC. See also Beumer et al. (2008) Efficient gene targeting in Drosophila by direct embryo injection with zinc-finger nucleases. PNAS 105(50):19821-19826. Alternatively, nucleic acids encoding a subject variant Cas9 protein and/or a Cas9 guide RNA and/or a chimeric Cas9 protein and/or a PAMmer may be provided on DNA vectors. Many vectors, e.g. plasmids, cosmids, minicircles, phage, viruses, etc., useful for transferring nucleic acids into target cells are available. The vectors comprising the nucleic acid(s) may be maintained episomally, e.g. as plasmids, minicircle DNAs, viruses such cytomegalovirus, adenovirus, etc., or they may be integrated into the target cell genome, through homologous recombination or random integration, e.g. retrovirus-derived vectors such as MMLV, HIV-1, ALV, etc.

[0543] Vectors may be provided directly to the subject cells. In other words, the cells are contacted with vectors comprising the nucleic acid encoding Cas9 guide RNA and/or a variant Cas9 protein and/or a chimeric Cas9 protein and/or a PAMmer such that the vectors are taken up by the cells. Methods for contacting cells with nucleic acid vectors that are plasmids, including electroporation, calcium chloride transfection, microinjection, and lipofection are well known in the art. For viral vector delivery, the cells are contacted with viral particles comprising the nucleic acid encoding a subject variant Cas9 protein and/or a Cas9 guide RNA and/or a chimeric Cas9 protein and/or a PAMmer. Retroviruses, for example, lentiviruses, are suitable for use in methods of the present disclosure. Commonly used retroviral vectors are “defective”, i.e. unable to produce viral proteins required for productive infection. Rather, replication of the vector requires growth in a packaging cell line. To generate viral particles comprising nucleic acids of interest, the retroviral nucleic acids comprising the nucleic acid are packaged into viral capsids by a packaging cell line. Different packaging cell lines provide a different envelope protein (ecotropic, amphotropic or xenotropic) to be incorporated into the capsid, this envelope protein determining the specificity of the viral particle for the cells (ecotropic for murine and rat; amphotropic for most mammalian cell types including human, dog and mouse; and xenotropic for most mammalian cell types except murine cells). The appropriate packaging cell line may be used to ensure that the cells are targeted by the packaged viral particles. Methods of introducing the retroviral vectors comprising the nucleic acid encoding the reprogramming factors into packaging cell lines and of collecting the viral particles that are generated by the packaging lines are well known in the art. Nucleic acids can also introduced by direct micro-injection (e.g., injection of RNA into a zebrafish embryo).

[0544] Vectors used for providing the nucleic acids encoding Cas9 guide RNA and/or a Cas9 protein and/or a chimeric Cas9 protein and/or a PAMmer to the subject cells will typically comprise suitable promoters for driving the expression, that is, transcriptional activation, of the nucleic acid of interest. In other words, the nucleic acid of interest will be operably linked to a promoter. This may include ubiquitously acting promoters, for example, the CMV-β-actin promoter, or inducible promoters, such as promoters that are active in particular cell populations or that respond to the presence of drugs such as tetracycline. By transcriptional activation, it is intended that transcription will be increased above basal levels in the target cell by 10 fold, by 100 fold, more usually by 1000 fold. In addition, vectors used for providing a subject variant Cas9 protein and/or a Cas9 guide RNA and/or a chimeric Cas9 protein and/or a PAMmer to the subject cells may include nucleic acid sequences that encode for selectable markers in the target cells, so as to identify cells that have taken up the Cas9 guide RNA and/or a Cas9 protein and/or a chimeric Cas9 protein and/or a PAMmer.

[0545] A subject variant Cas9 protein and/or a Cas9 guide RNA and/or a chimeric Cas9 protein may instead be used to contact target nucleic acid (e.g., introduced into cells) as RNA (e.g., an mRNA encoding a subject variant Cas9 protein). Methods of introducing RNA into cells are known in the art and may include, for example, direct injection, transfection, or any other method used for the introduction of DNA.

[0546] A variant Cas9 protein may be provided to cells as a polypeptide (e.g., introduced into cells as a protein). Such a polypeptide may optionally be fused to a polypeptide domain that increases solubility of the product. The domain may be linked to the polypeptide through a defined protease cleavage site, e.g. a TEV sequence, which is cleaved by TEV protease. The linker may also include one or more flexible sequences, e.g. from 1 to 10 glycine residues. In some embodiments, the cleavage of the fusion protein is performed in a buffer that maintains solubility of the product, e.g. in the presence of from 0.5 to 2 M urea, in the presence of polypeptides and/or polynucleotides that increase solubility, and the like. Domains of interest include endosomolytic domains, e.g. influenza HA domain; and other polypeptides that aid in production, e.g. IF2 domain, GST domain, GRPE domain, and the like. The polypeptide may be formulated for improved stability. For example, the peptides may be PEGylated, where the polyethyleneoxy group provides for enhanced lifetime in the blood stream.

[0547] Additionally or alternatively, the Cas9 protein may be fused to a polypeptide permeant domain to promote uptake by the cell. A number of permeant domains are known in the art and may be used in the non-integrating polypeptides of the present disclosure, including peptides, peptidomimetics, and non-peptide carriers. For example, a permeant peptide may be derived from the third alpha helix of Drosophila melanogaster transcription factor Antennapaedia, referred to as penetratin, which comprises the amino acid sequence RQIKIWFQNRRMKWKK (SEQ ID NO:268). As another example, the permeant peptide comprises the HIV-1 tat basic region amino acid sequence, which may include, for example, amino acids 49-57 of naturally-occurring tat protein. Other permeant domains include poly-arginine motifs, for example, the region of amino acids 34-56 of HIV-1 rev protein, nona-arginine, octa-arginine, and the like. (See, for example, Futaki et al. (2003) Curr Protein Pept Sci. 2003 April; 4(2): 87-9 and 446; and Wender et al. (2000) Proc. Natl. Acad. Sci. U.S.A 2000 Nov. 21; 97(24):13003-8; published U.S. Patent applications 20030220334; 20030083256; 20030032593; and 20030022831, herein specifically incorporated by reference for the teachings of translocation peptides and peptoids). The nona-arginine (R9) sequence is one of the more efficient PTDs that have been characterized (Wender et al. 2000; Uemura et al. 2002). The site at which the fusion is made may be selected in order to optimize the biological activity, secretion or binding characteristics of the polypeptide. The optimal site will be determined by routine experimentation.

[0548] A variant Cas9 protein may be produced in vitro or by eukaryotic cells or by prokaryotic cells, and it may be further processed by unfolding, e.g. heat denaturation, DTT reduction, etc. and may be further refolded, using methods known in the art.

[0549] Modifications of interest that do not alter primary sequence include chemical derivatization of polypeptides, e.g., acylation, acetylation, carboxylation, amidation, etc. Also included are modifications of glycosylation, e.g. those made by modifying the glycosylation patterns of a polypeptide during its synthesis and processing or in further processing steps; e.g. by exposing the polypeptide to enzymes which affect glycosylation, such as mammalian glycosylating or deglycosylating enzymes. Also embraced are sequences that have phosphorylated amino acid residues, e.g. phosphotyrosine, phosphoserine, or phosphothreonine.

[0550] Also suitable for inclusion in embodiments of the present disclosure are Cas9 guide RNAs, PAMmers (e.g., quenched PAMmers), and Cas9 proteins that have been modified using ordinary molecular biological techniques and synthetic chemistry so as to improve their resistance to proteolytic degradation, to change the target sequence specificity, to optimize solubility properties, to alter protein activity (e.g., transcription modulatory activity, enzymatic activity, etc.) or to render them more suitable as a therapeutic agent. Analogs of such polypeptides include those containing residues other than naturally occurring L-amino acids, e.g. D-amino acids or non-naturally occurring synthetic amino acids. D-amino acids may be substituted for some or all of the amino acid residues.

[0551] The Cas9 proteins may be prepared by in vitro synthesis, using conventional methods as known in the art. Various commercial synthetic apparatuses are available, for example, automated synthesizers by Applied Biosystems, Inc., Beckman, etc. By using synthesizers, naturally occurring amino acids may be substituted with unnatural amino acids. The particular sequence and the manner of preparation will be determined by convenience, economics, purity required, and the like.

[0552] If desired, various groups may be introduced into the peptide during synthesis or during expression, which allow for linking to other molecules or to a surface. Thus cysteines can be used to make thioethers, histidines for linking to a metal ion complex, carboxyl groups for forming amides or esters, amino groups for forming amides, and the like.

[0553] The Cas9 proteins may also be isolated and purified in accordance with conventional methods of recombinant synthesis. A lysate may be prepared of the expression host and the lysate purified using HPLC, exclusion chromatography, gel electrophoresis, affinity chromatography, or other purification technique. For the most part, the compositions which are used will comprise 20% or more by weight of the desired product, more usually 75% or more by weight, preferably 95% or more by weight, and for therapeutic purposes, usually 99.5% or more by weight, in relation to contaminants related to the method of preparation of the product and its purification. Usually, the percentages will be based upon total protein.

[0554] To induce cleavage or any desired modification to a target nucleic acid, or any desired modification to a polypeptide associated with target nucleic acid, the Cas9 guide RNA and/or the Cas9 protein and/or the PAMmer, whether they be introduced as nucleic acids or polypeptides, are provided to the cells for about 30 minutes to about 24 hours, e.g., 1 hour, 1.5 hours, 2 hours, 2.5 hours, 3 hours, 3.5 hours 4 hours, 5 hours, 6 hours, 7 hours, 8 hours, 12 hours, 16 hours, 18 hours, 20 hours, or any other period from about 30 minutes to about 24 hours, which may be repeated with a frequency of about every day to about every 4 days, e.g., every 1.5 days, every 2 days, every 3 days, or any other frequency from about every day to about every four days. The agent(s) may be provided to the subject cells one or more times, e.g. one time, twice, three times, or more than three times, and the cells allowed to incubate with the agent(s) for some amount of time following each contacting event e.g. 16-24 hours, after which time the media is replaced with fresh media and the cells are cultured further.

[0555] In cases in which two or more different targeting complexes are provided to the cell (e.g., two different Cas9 guide RNAs that are complementary to different sequences within the same or different target nucleic acid), the complexes may be provided simultaneously (e.g. as two polypeptides and/or nucleic acids), or delivered simultaneously. Alternatively, they may be provided consecutively, e.g. the targeting complex being provided first, followed by the second targeting complex, etc. or vice versa.

### Nucleic Acid Modifications

[0556] In some embodiments, a subject nucleic acid (e.g., a DNA or RNA encoding a variant Cas9 protein, a Cas9 guide RNA, a PAMmer, etc.) has one or more modifications, e.g., a base modification, a backbone modification, etc., to provide the nucleic acid with a new or enhanced feature (e.g., improved stability). A nucleoside is a base-sugar combination. The base portion of the nucleoside is normally a heterocyclic base. The two most common classes of such heterocyclic bases are the purines and the pyrimidines. Nucleotides are nucleosides that further include a phosphate group covalently linked to the sugar portion of the nucleoside. For those nucleosides that include a pentofuranosyl sugar, the phosphate group can be linked to the 2′, the 3′, or the 5′ hydroxyl moiety of the sugar. In forming oligonucleotides, the phosphate groups covalently link adjacent nucleosides to one another to form a linear polymeric compound. In turn, the respective ends of this linear polymeric compound can be further joined to form a circular compound, however, linear compounds are suitable. In addition, linear compounds may have internal nucleotide base complementarity and may therefore fold in a manner as to produce a fully or partially double-stranded compound. Within oligonucleotides, the phosphate groups are commonly referred to as forming the internucleoside backbone of the oligonucleotide. The normal linkage or backbone of RNA and DNA is a 3′ to 5′ phosphodiester linkage.

[0557] Suitable nucleic acid modifications include, but are not limited to: 2′Omethyl modified nucleotides, 2′ Fluoro modified nucleotides, locked nucleic acid (LNA) modified nucleotides, peptide nucleic acid (PNA) modified nucleotides, nucleotides with phosphorothioate linkages, and a 5′ cap (e.g., a 7-methylguanylate cap (m7G)). Additional details and additional modifications are described below.

[0558] In some cases, 2% or more of the nucleotides of a subject nucleic acid (e.g., a Cas9 guide RNA, a PAMmer, etc.) are modified (e.g., 3% or more, 5% or more, 7.5% or more, 10% or more, 15% or more, 20% or more, 25% or more, 30% or more, 35% or more, 40% or more, 45% or more, 50% or more, 55% or more, 60% or more, 65% or more, 75% or more, 80% or more, 85% or more, 90% or more, 95% or more, or 100% of the nucleotides of a subject nucleic acid are modified). In some cases, 2% or more of the nucleotides of a subject PAMmer are modified (e.g., 3% or more, 5% or more, 7.5% or more, 10% or more, 15% or more, 20% or more, 25% or more, 30% or more, 35% or more, 40% or more, 45% or more, 50% or more, 55% or more, 60% or more, 65% or more, 75% or more, 80% or more, 85% or more, 90% or more, 95% or more, or 100% of the nucleotides of a subject PAMmer are modified). In some cases, 2% or more of the nucleotides of a Cas9 guide RNA are modified (e.g., 3% or more, 5% or more, 7.5% or more, 10% or more, 15% or more, 20% or more, 25% or more, 30% or more, 35% or more, 40% or more, 45% or more, 50% or more, 55% or more, 60% or more, 65% or more, 75% or more, 80% or more, 85% or more, 90% or more, 95% or more, or 100% of the nucleotides of a Cas9 guide RNA are modified).

[0559] In some cases, the number of nucleotides of a subject nucleic acid nucleic acid (e.g., a Cas9 guide RNA, a PAMmer, etc.) that are modified is in a range of from 3% to 100% (e.g., 3% to 100%, 3% to 95%, 3% to 90%, 3% to 85%, 3% to 80%, 3% to 75%, 3% to 70%, 3% to 65%, 3% to 60%, 3% to 55%, 3% to 50%, 3% to 45%, 3% to 40%, 5% to 100%, 5% to 95%, 5% to 90%, 5% to 85%, 5% to 80%, 5% to 75%, 5% to 70%, 5% to 65%, 5% to 60%, 5% to 55%, 5% to 50%, 5% to 45%, 5% to 40%, 10% to 100%, 10% to 95%, 10% to 90%, 10% to 85%, 10% to 80%, 10% to 75%, 10% to 70%, 10% to 65%, 10% to 60%, 10% to 55%, 10% to 50%, 10% to 45%, or 10% to 40%). In some cases, the number of nucleotides of a subject PAMmer that are modified is in a range of from 3% to 100% (e.g., 3% to 100%, 3% to 95%, 3% to 90%, 3% to 85%, 3% to 80%, 3% to 75%, 3% to 70%, 3% to 65%, 3% to 60%, 3% to 55%, 3% to 50%, 3% to 45%, 3% to 40%, 5% to 100%, 5% to 95%, 5% to 90%, 5% to 85%, 5% to 80%, 5% to 75%, 5% to 70%, 5% to 65%, 5% to 60%, 5% to 55%, 5% to 50%, 5% to 45%, 5% to 40%, 10% to 100%, 10% to 95%, 10% to 90%, 10% to 85%, 10% to 80%, 10% to 75%, 10% to 70%, 10% to 65%, 10% to 60%, 10% to 55%, 10% to 50%, 10% to 45%, or 10% to 40%). In some cases, the number of nucleotides of a Cas9 guide RNA that are modified is in a range of from 3% to 100% (e.g., 3% to 100%, 3% to 95%, 3% to 90%, 3% to 85%, 3% to 80%, 3% to 75%, 3% to 70%, 3% to 65%, 3% to 60%, 3% to 55%, 3% to 50%, 3% to 45%, 3% to 40%, 5% to 100%, 5% to 95%, 5% to 90%, 5% to 85%, 5% to 80%, 5% to 75%, 5% to 70%, 5% to 65%, 5% to 60%, 5% to 55%, 5% to 50%, 5% to 45%, 5% to 40%, 10% to 100%, 10% to 95%, 10% to 90%, 10% to 85%, 10% to 80%, 10% to 75%, 10% to 70%, 10% to 65%, 10% to 60%, 10% to 55%, 10% to 50%, 10% to 45%, or 10% to 40%).

[0560] In some cases, one or more of the nucleotides of a subject nucleic acid (e.g., a Cas9 guide RNA, a PAMmer, etc.) are modified (e.g., 2 or more, 3 or more, 4 or more, 5 or more, 6 or more, 7 or more, 8 or more, 9 or more, 10 or more, 11 or more, 12 or more, 13 or more, 14 or more, 15 or more, 16 or more, 17 or more, 18 or more, 19 or more, 20 or more, 21 or more, 22 or more, or all of the nucleotides of a subject nucleic acid are modified). In some cases, one or more of the nucleotides of a subject PAMmer are modified (e.g., 2 or more, 3 or more, 4 or more, 5 or more, 6 or more, 7 or more, 8 or more, 9 or more, 10 or more, 11 or more, 12 or more, 13 or more, 14 or more, 15 or more, 16 or more, 17 or more, 18 or more, 19 or more, 20 or more, 21 or more, 22 or more, or all of the nucleotides of a subject PAMmer are modified). In some cases, one or more of the nucleotides of a Cas9 guide RNA are modified (e.g., 2 or more, 3 or more, 4 or more, 5 or more, 6 or more, 7 or more, 8 or more, 9 or more, 10 or more, 11 or more, 12 or more, 13 or more, 14 or more, 15 or more, 16 or more, 17 or more, 18 or more, 19 or more, 20 or more, 21 or more, 22 or more, or all of the nucleotides of a Cas9 guide RNA are modified).

[0561] In some cases, 99% or less of the nucleotides of a subject nucleic acid (e.g., a Cas9 guide RNA, a PAMmer, etc.) are modified (e.g., 99% or less, 95% or less, 90% or less, 85% or less, 80% or less, 75% or less, 70% or less, 65% or less, 60% or less, 55% or less, 50% or less, or 45% or less of the nucleotides of a subject nucleic acid are modified). In some cases, 99% or less of the nucleotides of a subject PAMmer are modified (e.g., e.g., 99% or less, 95% or less, 90% or less, 85% or less, 80% or less, 75% or less, 70% or less, 65% or less, 60% or less, 55% or less, 50% or less, or 45% or less of the nucleotides of a subject PAMmer are modified). In some cases, 99% or less of the nucleotides of a Cas9 guide RNA are modified (e.g., 99% or less, 95% or less, 90% or less, 85% or less, 80% or less, 75% or less, 70% or less, 65% or less, 60% or less, 55% or less, 50% or less, or 45% or less of the nucleotides of a Cas9 guide RNA are modified).

[0562] In some cases, the number of nucleotides of a subject nucleic acid nucleic acid (e.g., a Cas9 guide RNA, a PAMmer, etc.) that are modified is in a range of from 1 to 30 (e.g., 1 to 25, 1 to 20, 1 to 18, 1 to 15, 1 to 10, 2 to 25, 2 to 20, 2 to 18, 2 to 15, 2 to 10, 3 to 25, 3 to 20, 3 to 18, 3 to 15, or 3 to 10). In some cases, the number of nucleotides of a subject PAMmer that are modified is in a range of from 1 to 30 (e.g., 1 to 25, 1 to 20, 1 to 18, 1 to 15, 1 to 10, 2 to 25, 2 to 20, 2 to 18, 2 to 15, 2 to 10, 3 to 25, 3 to 20, 3 to 18, 3 to 15, or 3 to 10). In some cases, the number of nucleotides of a Cas9 guide RNA that are modified is in a range of from 1 to 30 (e.g., 1 to 25, 1 to 20, 1 to 18, 1 to 15, 1 to 10, 2 to 25, 2 to 20, 2 to 18, 2 to 15, 2 to 10, 3 to 25, 3 to 20, 3 to 18, 3 to 15, or 3 to 10).

[0563] In some cases, 20 or fewer of the nucleotides of a subject nucleic acid (e.g., a Cas9 guide RNA, a PAMmer, etc.) are modified (e.g., 19 or fewer, 18 or fewer, 17 or fewer, 16 or fewer, 15 or fewer, 14 or fewer, 13 or fewer, 12 or fewer, 11 or fewer, 10 or fewer, 9 or fewer, 8 or fewer, 7 or fewer, 6 or fewer, 5 or fewer, 4 or fewer, 3 or fewer, 2 or fewer, or one, of the nucleotides of a subject nucleic acid are modified). In some cases, 20 or fewer of the nucleotides of a subject PAMmer are modified (e.g., 19 or fewer, 18 or fewer, 17 or fewer, 16 or fewer, 15 or fewer, 14 or fewer, 13 or fewer, 12 or fewer, 11 or fewer, 10 or fewer, 9 or fewer, 8 or fewer, 7 or fewer, 6 or fewer, 5 or fewer, 4 or fewer, 3 or fewer, 2 or fewer, or one, of the nucleotides of a subject PAMmer are modified). In some cases, 20 or fewer of the nucleotides of a Cas9 guide RNA are modified (e.g., 19 or fewer, 18 or fewer, 17 or fewer, 16 or fewer, 15 or fewer, 14 or fewer, 13 or fewer, 12 or fewer, 11 or fewer, 10 or fewer, 9 or fewer, 8 or fewer, 7 or fewer, 6 or fewer, 5 or fewer, 4 or fewer, 3 or fewer, 2 or fewer, or one, of the nucleotides of a Cas9 guide RNA are modified).

[0564] A 2′-O-Methyl modified nucleotide (also referred to as 2′-O-Methyl RNA) is a naturally occurring modification of RNA found in tRNA and other small RNAs that arises as a post-transcriptional modification. Oligonucleotides can be directly synthesized that contain 2′-O-Methyl RNA. This modification increases Tm of RNA:RNA duplexes but results in only small changes in RNA:DNA stability. It is stable with respect to attack by single-stranded ribonucleases and is typically 5 to 10-fold less susceptible to DNases than DNA. It is commonly used in antisense oligos as a means to increase stability and binding affinity to the target message.

[0565] In some cases, 2% or more of the nucleotides of a subject nucleic acid (e.g., a Cas9 guide RNA, a PAMmer, etc.) are 2′-O-Methyl modified (e.g., 3% or more, 5% or more, 7.5% or more, 10% or more, 15% or more, 20% or more, 25% or more, 30% or more, 35% or more, 40% or more, 45% or more, 50% or more, 55% or more, 60% or more, 65% or more, 75% or more, 80% or more, 85% or more, 90% or more, 95% or more, or 100% of the nucleotides of a subject nucleic acid are 2′-O-Methyl modified). In some cases, 2% or more of the nucleotides of a subject PAMmer are 2′-O-Methyl modified (e.g., 3% or more, 5% or more, 7.5% or more, 10% or more, 15% or more, 20% or more, 25% or more, 30% or more, 35% or more, 40% or more, 45% or more, 50% or more, 55% or more, 60% or more, 65% or more, 75% or more, 80% or more, 85% or more, 90% or more, 95% or more, or 100% of the nucleotides of a subject PAMmer are 2′-O-Methyl modified). In some cases, 2% or more of the nucleotides of a Cas9 guide RNA are 2′-O-Methyl modified (e.g., 3% or more, 5% or more, 7.5% or more, 10% or more, 15% or more, 20% or more, 25% or more, 30% or more, 35% or more, 40% or more, 45% or more, 50% or more, 55% or more, 60% or more, 65% or more, 75% or more, 80% or more, 85% or more, 90% or more, 95% or more, or 100% of the nucleotides of a Cas9 guide RNA are 2′-O-Methyl modified).

[0566] In some cases, the number of nucleotides of a subject nucleic acid nucleic acid (e.g., a Cas9 guide RNA, a PAMmer, etc.) that are 2′-O-Methyl modified is in a range of from 3% to 100% (e.g., 3% to 100%, 3% to 95%, 3% to 90%, 3% to 85%, 3% to 80%, 3% to 75%, 3% to 70%, 3% to 65%, 3% to 60%, 3% to 55%, 3% to 50%, 3% to 45%, 3% to 40%, 5% to 100%, 5% to 95%, 5% to 90%, 5% to 85%, 5% to 80%, 5% to 75%, 5% to 70%, 5% to 65%, 5% to 60%, 5% to 55%, 5% to 50%, 5% to 45%, 5% to 40%, 10% to 100%, 10% to 95%, 10% to 90%, 10% to 85%, 10% to 80%, 10% to 75%, 10% to 70%, 10% to 65%, 10% to 60%, 10% to 55%, 10% to 50%, 10% to 45%, or 10% to 40%). In some cases, the number of nucleotides of a subject PAMmer that are 2′-O-Methyl modified is in a range of from 3% to 100% (e.g., 3% to 100%, 3% to 95%, 3% to 90%, 3% to 85%, 3% to 80%, 3% to 75%, 3% to 70%, 3% to 65%, 3% to 60%, 3% to 55%, 3% to 50%, 3% to 45%, 3% to 40%, 5% to 100%, 5% to 95%, 5% to 90%, 5% to 85%, 5% to 80%, 5% to 75%, 5% to 70%, 5% to 65%, 5% to 60%, 5% to 55%, 5% to 50%, 5% to 45%, 5% to 40%, 10% to 100%, 10% to 95%, 10% to 90%, 10% to 85%, 10% to 80%, 10% to 75%, 10% to 70%, 10% to 65%, 10% to 60%, 10% to 55%, 10% to 50%, 10% to 45%, or 10% to 40%). In some cases, the number of nucleotides of a Cas9 guide RNA that are 2′-O-Methyl modified is in a range of from 3% to 100% (e.g., 3% to 100%, 3% to 95%, 3% to 90%, 3% to 85%, 3% to 80%, 3% to 75%, 3% to 70%, 3% to 65%, 3% to 60%, 3% to 55%, 3% to 50%, 3% to 45%, 3% to 40%, 5% to 100%, 5% to 95%, 5% to 90%, 5% to 85%, 5% to 80%, 5% to 75%, 5% to 70%, 5% to 65%, 5% to 60%, 5% to 55%, 5% to 50%, 5% to 45%, 5% to 40%, 10% to 100%, 10% to 95%, 10% to 90%, 10% to 85%, 10% to 80%, 10% to 75%, 10% to 70%, 10% to 65%, 10% to 60%, 10% to 55%, 10% to 50%, 10% to 45%, or 10% to 40%).

[0567] In some cases, one or more of the nucleotides of a subject nucleic acid (e.g., a Cas9 guide RNA, a PAMmer, etc.) are 2′-O-Methyl modified (e.g., 2 or more, 3 or more, 4 or more, 5 or more, 6 or more, 7 or more, 8 or more, 9 or more, 10 or more, 11 or more, 12 or more, 13 or more, 14 or more, 15 or more, 16 or more, 17 or more, 18 or more, 19 or more, 20 or more, 21 or more, 22 or more, or all of the nucleotides of a subject nucleic acid are 2′-O-Methyl modified). In some cases, one or more of the nucleotides of a subject PAMmer are 2′-O-Methyl modified (e.g., 2 or more, 3 or more, 4 or more, 5 or more, 6 or more, 7 or more, 8 or more, 9 or more, 10 or more, 11 or more, 12 or more, 13 or more, 14 or more, 15 or more, 16 or more, 17 or more, 18 or more, 19 or more, 20 or more, 21 or more, 22 or more, or all of the nucleotides of a subject PAMmer are 2′-O-Methyl modified). In some cases, one or more of the nucleotides of a Cas9 guide RNA are 2′-O-Methyl modified (e.g., 2 or more, 3 or more, 4 or more, 5 or more, 6 or more, 7 or more, 8 or more, 9 or more, 10 or more, 11 or more, 12 or more, 13 or more, 14 or more, 15 or more, 16 or more, 17 or more, 18 or more, 19 or more, 20 or more, 21 or more, 22 or more, or all of the nucleotides of a Cas9 guide RNA are 2′-O-Methyl modified).

[0568] In some cases, 99% or less of the nucleotides of a subject nucleic acid (e.g., a Cas9 guide RNA, a PAMmer, etc.) are 2′-O-Methyl modified (e.g., 99% or less, 95% or less, 90% or less, 85% or less, 80% or less, 75% or less, 70% or less, 65% or less, 60% or less, 55% or less, 50% or less, or 45% or less of the nucleotides of a subject nucleic acid are 2′-O-Methyl modified). In some cases, 99% or less of the nucleotides of a subject PAMmer are 2′-O-Methyl modified (e.g., e.g., 99% or less, 95% or less, 90% or less, 85% or less, 80% or less, 75% or less, 70% or less, 65% or less, 60% or less, 55% or less, 50% or less, or 45% or less of the nucleotides of a subject PAMmer are 2′-O-Methyl modified). In some cases, 99% or less of the nucleotides of a Cas9 guide RNA are 2′-O-Methyl modified (e.g., 99% or less, 95% or less, 90% or less, 85% or less, 80% or less, 75% or less, 70% or less, 65% or less, 60% or less, 55% or less, 50% or less, or 45% or less of the nucleotides of a Cas9 guide RNA are 2′-O-Methyl modified).

[0569] In some cases, the number of nucleotides of a subject nucleic acid nucleic acid (e.g., a Cas9 guide RNA, a PAMmer, etc.) that are 2′-O-Methyl modified is in a range of from 1 to 30 (e.g., 1 to 25, 1 to 20, 1 to 18, 1 to 15, 1 to 10, 2 to 25, 2 to 20, 2 to 18, 2 to 15, 2 to 10, 3 to 25, 3 to 20, 3 to 18, 3 to 15, or 3 to 10). In some cases, the number of nucleotides of a subject PAMmer that are 2′-O-Methyl modified is in a range of from 1 to 30 (e.g., 1 to 25, 1 to 20, 1 to 18, 1 to 15, 1 to 10, 2 to 25, 2 to 20, 2 to 18, 2 to 15, 2 to 10, 3 to 25, 3 to 20, 3 to 18, 3 to 15, or 3 to 10). In some cases, the number of nucleotides of a Cas9 guide RNA that are 2′-O-Methyl modified is in a range of from 1 to 30 (e.g., 1 to 25, 1 to 20, 1 to 18, 1 to 15, 1 to 10, 2 to 25, 2 to 20, 2 to 18, 2 to 15, 2 to 10, 3 to 25, 3 to 20, 3 to 18, 3 to 15, or 3 to 10).

[0570] In some cases, 20 or fewer of the nucleotides of a subject nucleic acid (e.g., a Cas9 guide RNA, a PAMmer, etc.) are 2′-O-Methyl modified (e.g., 19 or fewer, 18 or fewer, 17 or fewer, 16 or fewer, 15 or fewer, 14 or fewer, 13 or fewer, 12 or fewer, 11 or fewer, 10 or fewer, 9 or fewer, 8 or fewer, 7 or fewer, 6 or fewer, 5 or fewer, 4 or fewer, 3 or fewer, 2 or fewer, or one, of the nucleotides of a subject nucleic acid are 2′-O-Methyl modified). In some cases, 20 or fewer of the nucleotides of a subject PAMmer are 2′-O-Methyl modified (e.g., 19 or fewer, 18 or fewer, 17 or fewer, 16 or fewer, 15 or fewer, 14 or fewer, 13 or fewer, 12 or fewer, 11 or fewer, 10 or fewer, 9 or fewer, 8 or fewer, 7 or fewer, 6 or fewer, 5 or fewer, 4 or fewer, 3 or fewer, 2 or fewer, or one, of the nucleotides of a subject PAMmer are 2′-O-Methyl modified). In some cases, 20 or fewer of the nucleotides of a Cas9 guide RNA are 2′-O-Methyl modified (e.g., 19 or fewer, 18 or fewer, 17 or fewer, 16 or fewer, 15 or fewer, 14 or fewer, 13 or fewer, 12 or fewer, 11 or fewer, 10 or fewer, 9 or fewer, 8 or fewer, 7 or fewer, 6 or fewer, 5 or fewer, 4 or fewer, 3 or fewer, 2 or fewer, or one, of the nucleotides of a Cas9 guide RNA are 2′-O-Methyl modified).

[0571] 2′ Fluoro modified nucleotides (e.g., 2′ Fluoro bases) have a fluorine modified ribose which increases binding affinity (Tm) and also confers some relative nuclease resistance when compared to native RNA. These modifications are commonly employed in ribozymes and siRNAs to improve stability in serum or other biological fluids.

[0572] In some cases, 2% or more of the nucleotides of a subject nucleic acid (e.g., a Cas9 guide RNA, a PAMmer, etc.) are 2′ Fluoro modified (e.g., 3% or more, 5% or more, 7.5% or more, 10% or more, 15% or more, 20% or more, 25% or more, 30% or more, 35% or more, 40% or more, 45% or more, 50% or more, 55% or more, 60% or more, 65% or more, 75% or more, 80% or more, 85% or more, 90% or more, 95% or more, or 100% of the nucleotides of a subject nucleic acid are 2′ Fluoro modified). In some cases, 2% or more of the nucleotides of a subject PAMmer are 2′ Fluoro modified (e.g., 3% or more, 5% or more, 7.5% or more, 10% or more, 15% or more, 20% or more, 25% or more, 30% or more, 35% or more, 40% or more, 45% or more, 50% or more, 55% or more, 60% or more, 65% or more, 75% or more, 80% or more, 85% or more, 90% or more, 95% or more, or 100% of the nucleotides of a subject PAMmer are 2′ Fluoro modified). In some cases, 2% or more of the nucleotides of a Cas9 guide RNA are 2′ Fluoro modified (e.g., 3% or more, 5% or more, 7.5% or more, 10% or more, 15% or more, 20% or more, 25% or more, 30% or more, 35% or more, 40% or more, 45% or more, 50% or more, 55% or more, 60% or more, 65% or more, 75% or more, 80% or more, 85% or more, 90% or more, 95% or more, or 100% of the nucleotides of a Cas9 guide RNA are 2′ Fluoro modified).

[0573] In some cases, the number of nucleotides of a subject nucleic acid nucleic acid (e.g., a Cas9 guide RNA, a PAMmer, etc.) that are 2′ Fluoro modified is in a range of from 3% to 100% (e.g., 3% to 100%, 3% to 95%, 3% to 90%, 3% to 85%, 3% to 80%, 3% to 75%, 3% to 70%, 3% to 65%, 3% to 60%, 3% to 55%, 3% to 50%, 3% to 45%, 3% to 40%, 5% to 100%, 5% to 95%, 5% to 90%, 5% to 85%, 5% to 80%, 5% to 75%, 5% to 70%, 5% to 65%, 5% to 60%, 5% to 55%, 5% to 50%, 5% to 45%, 5% to 40%, 10% to 100%, 10% to 95%, 10% to 90%, 10% to 85%, 10% to 80%, 10% to 75%, 10% to 70%, 10% to 65%, 10% to 60%, 10% to 55%, 10% to 50%, 10% to 45%, or 10% to 40%). In some cases, the number of nucleotides of a subject PAMmer that are 2′ Fluoro modified is in a range of from 3% to 100% (e.g., 3% to 100%, 3% to 95%, 3% to 90%, 3% to 85%, 3% to 80%, 3% to 75%, 3% to 70%, 3% to 65%, 3% to 60%, 3% to 55%, 3% to 50%, 3% to 45%, 3% to 40%, 5% to 100%, 5% to 95%, 5% to 90%, 5% to 85%, 5% to 80%, 5% to 75%, 5% to 70%, 5% to 65%, 5% to 60%, 5% to 55%, 5% to 50%, 5% to 45%, 5% to 40%, 10% to 100%, 10% to 95%, 10% to 90%, 10% to 85%, 10% to 80%, 10% to 75%, 10% to 70%, 10% to 65%, 10% to 60%, 10% to 55%, 10% to 50%, 10% to 45%, or 10% to 40%). In some cases, the number of nucleotides of a Cas9 guide RNA that are 2′ Fluoro modified is in a range of from 3% to 100% (e.g., 3% to 100%, 3% to 95%, 3% to 90%, 3% to 85%, 3% to 80%, 3% to 75%, 3% to 70%, 3% to 65%, 3% to 60%, 3% to 55%, 3% to 50%, 3% to 45%, 3% to 40%, 5% to 100%, 5% to 95%, 5% to 90%, 5% to 85%, 5% to 80%, 5% to 75%, 5% to 70%, 5% to 65%, 5% to 60%, 5% to 55%, 5% to 50%, 5% to 45%, 5% to 40%, 10% to 100%, 10% to 95%, 10% to 90%, 10% to 85%, 10% to 80%, 10% to 75%, 10% to 70%, 10% to 65%, 10% to 60%, 10% to 55%, 10% to 50%, 10% to 45%, or 10% to 40%).

[0574] In some cases, one or more of the nucleotides of a subject nucleic acid (e.g., a Cas9 guide RNA, a PAMmer, etc.) are 2′ Fluoro modified (e.g., 2 or more, 3 or more, 4 or more, 5 or more, 6 or more, 7 or more, 8 or more, 9 or more, 10 or more, 11 or more, 12 or more, 13 or more, 14 or more, 15 or more, 16 or more, 17 or more, 18 or more, 19 or more, 20 or more, 21 or more, 22 or more, or all of the nucleotides of a subject nucleic acid are 2′ Fluoro modified). In some cases, one or more of the nucleotides of a subject PAMmer are 2′ Fluoro modified (e.g., 2 or more, 3 or more, 4 or more, 5 or more, 6 or more, 7 or more, 8 or more, 9 or more, 10 or more, 11 or more, 12 or more, 13 or more, 14 or more, 15 or more, 16 or more, 17 or more, 18 or more, 19 or more, 20 or more, 21 or more, 22 or more, or all of the nucleotides of a subject PAMmer are 2′ Fluoro modified). In some cases, one or more of the nucleotides of a Cas9 guide RNA are 2′ Fluoro modified (e.g., 2 or more, 3 or more, 4 or more, 5 or more, 6 or more, 7 or more, 8 or more, 9 or more, 10 or more, 11 or more, 12 or more, 13 or more, 14 or more, 15 or more, 16 or more, 17 or more, 18 or more, 19 or more, 20 or more, 21 or more, 22 or more, or all of the nucleotides of a Cas9 guide RNA are 2′ Fluoro modified).

[0575] In some cases, 99% or less of the nucleotides of a subject nucleic acid (e.g., a Cas9 guide RNA, a PAMmer, etc.) are 2′ Fluoro modified (e.g., 99% or less, 95% or less, 90% or less, 85% or less, 80% or less, 75% or less, 70% or less, 65% or less, 60% or less, 55% or less, 50% or less, or 45% or less of the nucleotides of a subject nucleic acid are 2′ Fluoro modified). In some cases, 99% or less of the nucleotides of a subject PAMmer are 2′ Fluoro modified (e.g., e.g., 99% or less, 95% or less, 90% or less, 85% or less, 80% or less, 75% or less, 70% or less, 65% or less, 60% or less, 55% or less, 50% or less, or 45% or less of the nucleotides of a subject PAMmer are 2′ Fluoro modified). In some cases, 99% or less of the nucleotides of a Cas9 guide RNA are 2′ Fluoro modified (e.g., 99% or less, 95% or less, 90% or less, 85% or less, 80% or less, 75% or less, 70% or less, 65% or less, 60% or less, 55% or less, 50% or less, or 45% or less of the nucleotides of a Cas9 guide RNA are 2′ Fluoro modified).

[0576] In some cases, the number of nucleotides of a subject nucleic acid nucleic acid (e.g., a Cas9 guide RNA, a PAMmer, etc.) that are 2′ Fluoro modified is in a range of from 1 to 30 (e.g., 1 to 25, 1 to 20, 1 to 18, 1 to 15, 1 to 10, 2 to 25, 2 to 20, 2 to 18, 2 to 15, 2 to 10, 3 to 25, 3 to 20, 3 to 18, 3 to 15, or 3 to 10). In some cases, the number of nucleotides of a subject PAMmer that are 2′ Fluoro modified is in a range of from 1 to 30 (e.g., 1 to 25, 1 to 20, 1 to 18, 1 to 15, 1 to 10, 2 to 25, 2 to 20, 2 to 18, 2 to 15, 2 to 10, 3 to 25, 3 to 20, 3 to 18, 3 to 15, or 3 to 10). In some cases, the number of nucleotides of a Cas9 guide RNA that are 2′ Fluoro modified is in a range of from 1 to 30 (e.g., 1 to 25, 1 to 20, 1 to 18, 1 to 15, 1 to 10, 2 to 25, 2 to 20, 2 to 18, 2 to 15, 2 to 10.3 to 25.3 to 20.3 to 18.3 to 15, or 3 to 10).

[0577] In some cases, 20 or fewer of the nucleotides of a subject nucleic acid (e.g., a Cas9 guide RNA, a PAMmer, etc.) are 2′ Fluoro modified (e.g., 19 or fewer, 18 or fewer, 17 or fewer, 16 or fewer, 15 or fewer, 14 or fewer, 13 or fewer, 12 or fewer, 11 or fewer, 10 or fewer, 9 or fewer, 8 or fewer, 7 or fewer, 6 or fewer, 5 or fewer, 4 or fewer, 3 or fewer, 2 or fewer, or one, of the nucleotides of a subject nucleic acid are 2′ Fluoro modified). In some cases, 20 or fewer of the nucleotides of a subject PAMmer are 2′ Fluoro modified (e.g., 19 or fewer, 18 or fewer, 17 or fewer, 16 or fewer, 15 or fewer, 14 or fewer, 13 or fewer, 12 or fewer, 11 or fewer, 10 or fewer, 9 or fewer, 8 or fewer, 7 or fewer, 6 or fewer, 5 or fewer, 4 or fewer, 3 or fewer, 2 or fewer, or one, of the nucleotides of a subject PAMmer are 2′ Fluoro modified). In some cases, 20 or fewer of the nucleotides of a Cas9 guide RNA are 2′ Fluoro modified (e.g., 19 or fewer, 18 or fewer, 17 or fewer, 16 or fewer, 15 or fewer, 14 or fewer, 13 or fewer, 12 or fewer, 11 or fewer, 10 or fewer, 9 or fewer, 8 or fewer, 7 or fewer, 6 or fewer, 5 or fewer, 4 or fewer, 3 or fewer, 2 or fewer, or one, of the nucleotides of a Cas9 guide RNA are 2′ Fluoro modified).

[0578] LNA bases have a modification to the ribose backbone that locks the base in the C3′-endo position, which favors RNA A-type helix duplex geometry. This modification significantly increases Tm and is also very nuclease resistant. Multiple LNA insertions can be placed in an oligo at any position except the 3′-end. Applications have been described ranging from antisense oligos to hybridization probes to SNP detection and allele specific PCR. Due to the large increase in Tm conferred by LNAs, they also can cause an increase in primer dimer formation as well as self-hairpin formation. In some cases, the number of LNAs incorporated into a single oligo is 10 bases or less.

[0579] In some cases, the number of nucleotides of a subject nucleic acid nucleic acid (e.g., a Cas9 guide RNA, a PAMmer, etc.) that have an LNA base is in a range of from 3% to 99% (e.g., 3% to 99%, 3% to 95%, 3% to 90%, 3% to 85%, 3% to 80%, 3% to 75%, 3% to 70%, 3% to 65%, 3% to 60%, 3% to 55%, 3% to 50%, 3% to 45%, 3% to 40%, 5% to 99%, 5% to 95%, 5% to 90%, 5% to 85%, 5% to 80%, 5% to 75%, 5% to 70%, 5% to 65%, 5% to 60%, 5% to 55%, 5% to 50%, 5% to 45%, 5% to 40%, 10% to 99%, 10% to 95%, 10% to 90%, 10% to 85%, 10% to 80%, 10% to 75%, 10% to 70%, 10% to 65%, 10% to 60%, 10% to 55%, 10% to 50%, 10% to 45%, or 10% to 40%). In some cases, the number of nucleotides of a subject PAMmer that have an LNA base is in a range of from 3% to 99% (e.g., 3% to 99%, 3% to 95%, 3% to 90%, 3% to 85%, 3% to 80%, 3% to 75%, 3% to 70%, 3% to 65%, 3% to 60%, 3% to 55%, 3% to 50%, 3% to 45%, 3% to 40%, 5% to 99%, 5% to 95%, 5% to 90%, 5% to 85%, 5% to 80%, 5% to 75%, 5% to 70%, 5% to 65%, 5% to 60%, 5% to 55%, 5% to 50%, 5% to 45%, 5% to 40%, 10% to 99%, 10% to 95%, 10% to 90%, 10% to 85%, 10% to 80%, 10% to 75%, 10% to 70%, 10% to 65%, 10% to 60%, 10% to 55%, 10% to 50%, 10% to 45%, or 10% to 40%). In some cases, the number of nucleotides of a Cas9 guide RNA that have an LNA base is in a range of from 3% to 99% (e.g., 3% to 99%, 3% to 95%, 3% to 90%, 3% to 85%, 3% to 80%, 3% to 75%, 3% to 70%, 3% to 65%, 3% to 60%, 3% to 55%, 3% to 50%, 3% to 45%, 3% to 40%, 5% to 99%, 5% to 95%, 5% to 90%, 5% to 85%, 5% to 80%, 5% to 75%, 5% to 70%, 5% to 65%, 5% to 60%, 5% to 55%, 5% to 50%, 5% to 45%, 5% to 40%, 10% to 99%, 10% to 95%, 10% to 90%, 10% to 85%, 10% to 80%, 10% to 75%, 10% to 70%, 10% to 65%, 10% to 60%, 10% to 55%, 10% to 50%, 10% to 45%, or 10% to 40%).

[0580] In some cases, one or more of the nucleotides of a subject nucleic acid (e.g., a Cas9 guide RNA, a PAMmer, etc.) have an LNA base (e.g., 2 or more, 3 or more, 4 or more, 5 or more, 6 or more, 7 or more, 8 or more, 9 or more, 10 or more, 11 or more, 12 or more, 13 or more, 14 or more, 15 or more, 16 or more, 17 or more, 18 or more, 19 or more, 20 or more, 21 or more, 22 or more, or all of the nucleotides of a subject nucleic acid have an LNA base). In some cases, one or more of the nucleotides of a subject PAMmer have an LNA base (e.g., 2 or more, 3 or more, 4 or more, 5 or more, 6 or more, 7 or more, 8 or more, 9 or more, 10 or more, 11 or more, 12 or more, 13 or more, 14 or more, 15 or more, 16 or more, 17 or more, 18 or more, 19 or more, 20 or more, 21 or more, 22 or more, or all of the nucleotides of a subject PAMmer have an LNA base). In some cases, one or more of the nucleotides of a Cas9 guide RNA have an LNA base (e.g., 2 or more, 3 or more, 4 or more, 5 or more, 6 or more, 7 or more, 8 or more, 9 or more, 10 or more, 11 or more, 12 or more, 13 or more, 14 or more, 15 or more, 16 or more, 17 or more, 18 or more, 19 or more, 20 or more, 21 or more, 22 or more, or all of the nucleotides of a Cas9 guide RNA have an LNA base).

[0581] In some cases, 99% or less of the nucleotides of a subject nucleic acid (e.g., a Cas9 guide RNA, a PAMmer, etc.) have an LNA base (e.g., 99% or less, 95% or less, 90% or less, 85% or less, 80% or less, 75% or less, 70% or less, 65% or less, 60% or less, 55% or less, 50% or less, or 45% or less of the nucleotides of a subject nucleic acid have an LNA base). In some cases, 99% or less of the nucleotides of a subject PAMmer have an LNA base (e.g., e.g., 99% or less, 95% or less, 90% or less, 85% or less, 80% or less, 75% or less, 70% or less, 65% or less, 60% or less, 55% or less, 50% or less, or 45% or less of the nucleotides of a subject PAMmer have an LNA base). In some cases, 99% or less of the nucleotides of a Cas9 guide RNA have an LNA base (e.g., 99% or less, 95% or less, 90% or less, 85% or less, 80% or less, 75% or less, 70% or less, 65% or less, 60% or less, 55% or less, 50% or less, or 45% or less of the nucleotides of a Cas9 guide RNA have an LNA base).

[0582] In some cases, the number of nucleotides of a subject nucleic acid nucleic acid (e.g., a Cas9 guide RNA, a PAMmer, etc.) that have an LNA base is in a range of from 1 to 30 (e.g., 1 to 25, 1 to 20, 1 to 18, 1 to 15, 1 to 10, 2 to 25, 2 to 20, 2 to 18, 2 to 15, 2 to 10, 3 to 25, 3 to 20, 3 to 18, 3 to 15, or 3 to 10). In some cases, the number of nucleotides of a subject PAMmer that have an LNA base is in a range of from 1 to 30 (e.g., 1 to 25, 1 to 20, 1 to 18, 1 to 15, 1 to 10, 2 to 25, 2 to 20, 2 to 18, 2 to 15, 2 to 10, 3 to 25, 3 to 20, 3 to 18, 3 to 15, or 3 to 10). In some cases, the number of nucleotides of a Cas9 guide RNA that have an LNA base is in a range of from 1 to 30 (e.g., 1 to 25, 1 to 20, 1 to 18, 1 to 15, 1 to 10, 2 to 25, 2 to 20, 2 to 18, 2 to 15, 2 to 10, 3 to 25, 3 to 20.3 to 18.3 to 15, or 3 to 10).

[0583] In some cases, 20 or fewer of the nucleotides of a subject nucleic acid (e.g., a Cas9 guide RNA, a PAMmer, etc.) have an LNA base (e.g., 19 or fewer, 18 or fewer, 17 or fewer, 16 or fewer, 15 or fewer, 14 or fewer, 13 or fewer, 12 or fewer, 11 or fewer, 10 or fewer, 9 or fewer, 8 or fewer, 7 or fewer, 6 or fewer, 5 or fewer, 4 or fewer, 3 or fewer, 2 or fewer, or one, of the nucleotides of a subject nucleic acid have an LNA base). In some cases, 20 or fewer of the nucleotides of a subject PAMmer have an LNA base (e.g., 19 or fewer, 18 or fewer, 17 or fewer, 16 or fewer, 15 or fewer, 14 or fewer, 13 or fewer, 12 or fewer, 11 or fewer, 10 or fewer, 9 or fewer, 8 or fewer, 7 or fewer, 6 or fewer, 5 or fewer, 4 or fewer, 3 or fewer, 2 or fewer, or one, of the nucleotides of a subject PAMmer have an LNA base). In some cases, 20 or fewer of the nucleotides of a Cas9 guide RNA have an LNA base (e.g., 19 or fewer, 18 or fewer, 17 or fewer, 16 or fewer, 15 or fewer, 14 or fewer, 13 or fewer, 12 or fewer, 11 or fewer, 10 or fewer, 9 or fewer, 8 or fewer, 7 or fewer, 6 or fewer, 5 or fewer, 4 or fewer, 3 or fewer, 2 or fewer, or one, of the nucleotides of a Cas9 guide RNA have an LNA base).

[0584] The phosphorothioate (PS) bond (i.e., a phosphorothioate linkage) substitutes a sulfur atom for a non-bridging oxygen in the phosphate backbone of a nucleic acid (e.g., an oligo). This modification renders the internucleotide linkage resistant to nuclease degradation. Phosphorothioate bonds can be introduced between the last 3-5 nucleotides at the 5′- or 3′-end of the oligo to inhibit exonuclease degradation. Including phosphorothioate bonds within the oligo (e.g., throughout the entire oligo) can help reduce attack by endonucleases as well.

[0585] In some cases, the number of nucleotides of a subject nucleic acid nucleic acid (e.g., a Cas9 guide RNA, a PAMmer, etc.) that have a phosphorothioate linkage is in a range of from 3% to 99% (e.g., 3% to 99%, 3% to 95%, 3% to 90%, 3% to 85%, 3% to 80%, 3% to 75%, 3% to 70%, 3% to 65%, 3% to 60%, 3% to 55%, 3% to 50%, 3% to 45%, 3% to 40%, 5% to 99%, 5% to 95%, 5% to 90%, 5% to 85%, 5% to 80%, 5% to 75%, 5% to 70%, 5% to 65%, 5% to 60%, 5% to 55%, 5% to 50%, 5% to 45%, 5% to 40%, 10% to 99%, 10% to 95%, 10% to 90%, 10% to 85%, 10% to 80%, 10% to 75%, 10% to 70%, 10% to 65%, 10% to 60%, 10% to 55%, 10% to 50%, 10% to 45%, or 10% to 40%). In some cases, the number of nucleotides of a subject PAMmer that have a phosphorothioate linkage is in a range of from 3% to 99% (e.g., 3% to 99%, 3% to 95%, 3% to 90%, 3% to 85%, 3% to 80%, 3% to 75%, 3% to 70%, 3% to 65%, 3% to 60%, 3% to 55%, 3% to 50%, 3% to 45%, 3% to 40%, 5% to 99%, 5% to 95%, 5% to 90%, 5% to 85%, 5% to 80%, 5% to 75%, 5% to 70%, 5% to 65%, 5% to 60%, 5% to 55%, 5% to 50%, 5% to 45%, 5% to 40%, 10% to 99%, 10% to 95%, 10% to 90%, 10% to 85%, 10% to 80%, 10% to 75%, 10% to 70%, 10% to 65%, 10% to 60%, 10% to 55%, 10% to 50%, 10% to 45%, or 10% to 40%). In some cases, the number of nucleotides of a Cas9 guide RNA that have a phosphorothioate linkage is in a range of from 3% to 99% (e.g., 3% to 99%, 3% to 95%, 3% to 90%, 3% to 85%, 3% to 80%, 3% to 75%, 3% to 70%, 3% to 65%, 3% to 60%, 3% to 55%, 3% to 50%, 3% to 45%, 3% to 40%, 5% to 99%, 5% to 95%, 5% to 90%, 5% to 85%, 5% to 80%, 5% to 75%, 5% to 70%, 5% to 65%, 5% to 60%, 5% to 55%, 5% to 50%, 5% to 45%, 5% to 40%, 10% to 99%, 10% to 95%, 10% to 90%, 10% to 85%, 10% to 80%, 10% to 75%, 10% to 70%, 10% to 65%, 10% to 60%, 10% to 55%, 10% to 50%, 10% to 45%, or 10% to 40%).

[0586] In some cases, one or more of the nucleotides of a subject nucleic acid (e.g., a Cas9 guide RNA, a PAMmer, etc.) have a phosphorothioate linkage (e.g., 2 or more, 3 or more, 4 or more, 5 or more, 6 or more, 7 or more, 8 or more, 9 or more, 10 or more, 11 or more, 12 or more, 13 or more, 14 or more, 15 or more, 16 or more, 17 or more, 18 or more, 19 or more, 20 or more, 21 or more, 22 or more, or all of the nucleotides of a subject nucleic acid have a phosphorothioate linkage). In some cases, one or more of the nucleotides of a subject PAMmer have a phosphorothioate linkage (e.g., 2 or more, 3 or more, 4 or more, 5 or more, 6 or more, 7 or more, 8 or more, 9 or more, 10 or more, 11 or more, 12 or more, 13 or more, 14 or more, 15 or more, 16 or more, 17 or more, 18 or more, 19 or more, 20 or more, 21 or more, 22 or more, or all of the nucleotides of a subject PAMmer have a phosphorothioate linkage). In some cases, one or more of the nucleotides of a Cas9 guide RNA have a phosphorothioate linkage (e.g., 2 or more, 3 or more, 4 or more, 5 or more, 6 or more, 7 or more, 8 or more, 9 or more, 10 or more, 11 or more, 12 or more, 13 or more, 14 or more, 15 or more, 16 or more, 17 or more, 18 or more, 19 or more, 20 or more, 21 or more, 22 or more, or all of the nucleotides of a Cas9 guide RNA have a phosphorothioate linkage).

[0587] In some cases, 99% or less of the nucleotides of a subject nucleic acid (e.g., a Cas9 guide RNA, a PAMmer, etc.) have a phosphorothioate linkage (e.g., 99% or less, 95% or less, 90% or less, 85% or less, 80% or less, 75% or less, 70% or less, 65% or less, 60% or less, 55% or less, 50% or less, or 45% or less of the nucleotides of a subject nucleic acid have a phosphorothioate linkage). In some cases, 99% or less of the nucleotides of a subject PAMmer have a phosphorothioate linkage (e.g., e.g., 99% or less, 95% or less, 90% or less, 85% or less, 80% or less, 75% or less, 70% or less, 65% or less, 60% or less, 55% or less, 50% or less, or 45% or less of the nucleotides of a subject PAMmer have a phosphorothioate linkage). In some cases, 99% or less of the nucleotides of a Cas9 guide RNA have a phosphorothioate linkage (e.g., 99% or less, 95% or less, 90% or less, 85% or less, 80% or less, 75% or less, 70% or less, 65% or less, 60% or less, 55% or less, 50% or less, or 45% or less of the nucleotides of a Cas9 guide RNA have a phosphorothioate linkage).

[0588] In some cases, the number of nucleotides of a subject nucleic acid nucleic acid (e.g., a Cas9 guide RNA, a PAMmer, etc.) that have a phosphorothioate linkage is in a range of from 1 to 30 (e.g., 1 to 25, 1 to 20, 1 to 18, 1 to 15, 1 to 10, 2 to 25, 2 to 20, 2 to 18, 2 to 15, 2 to 10, 3 to 25, 3 to 20, 3 to 18, 3 to 15, or 3 to 10). In some cases, the number of nucleotides of a subject PAMmer that have a phosphorothioate linkage is in a range of from 1 to 30 (e.g., 1 to 25, 1 to 20, 1 to 18, 1 to 15, 1 to 10, 2 to 25, 2 to 20, 2 to 18, 2 to 15, 2 to 10, 3 to 25, 3 to 20, 3 to 18, 3 to 15, or 3 to 10). In some cases, the number of nucleotides of a Cas9 guide RNA that have a phosphorothioate linkage is in a range of from 1 to 30 (e.g., 1 to 25, 1 to 20, 1 to 18, 1 to 15, 1 to 10.2 to 25.2 to 20.2 to 18.2 to 15.2 to 10.3 to 25.3 to 20.3 to 18.3 to 15, or 3 to 10).

[0589] In some cases, 20 or fewer of the nucleotides of a subject nucleic acid (e.g., a Cas9 guide RNA, a PAMmer, etc.) have a phosphorothioate linkage (e.g., 19 or fewer, 18 or fewer, 17 or fewer, 16 or fewer, 15 or fewer, 14 or fewer, 13 or fewer, 12 or fewer, 11 or fewer, 10 or fewer, 9 or fewer, 8 or fewer, 7 or fewer, 6 or fewer, 5 or fewer, 4 or fewer, 3 or fewer, 2 or fewer, or one, of the nucleotides of a subject nucleic acid have a phosphorothioate linkage). In some cases, 20 or fewer of the nucleotides of a subject PAMmer have a phosphorothioate linkage (e.g., 19 or fewer, 18 or fewer, 17 or fewer, 16 or fewer, 15 or fewer, 14 or fewer, 13 or fewer, 12 or fewer, 11 or fewer, 10 or fewer, 9 or fewer, 8 or fewer, 7 or fewer, 6 or fewer, 5 or fewer, 4 or fewer, 3 or fewer, 2 or fewer, or one, of the nucleotides of a subject PAMmer have a phosphorothioate linkage). In some cases, 20 or fewer of the nucleotides of a Cas9 guide RNA have a phosphorothioate linkage (e.g., 19 or fewer, 18 or fewer, 17 or fewer, 16 or fewer, 15 or fewer, 14 or fewer, 13 or fewer, 12 or fewer, 11 or fewer, 10 or fewer, 9 or fewer, 8 or fewer, 7 or fewer, 6 or fewer, 5 or fewer, 4 or fewer, 3 or fewer, 2 or fewer, or one, of the nucleotides of a Cas9 guide RNA have a phosphorothioate linkage).

[0590] In some embodiments, a subject nucleic acid (e.g., a Cas9 guide RNA, a PAMmer, etc.) has one or more nucleotides that are 2′-O-Methyl modified nucleotides. In some embodiments, a subject nucleic acid (e.g., a Cas9 guide RNA, a PAMmer, etc.) has one or more 2′ Fluoro modified nucleotides. In some embodiments, a subject nucleic acid (e.g., a Cas9 guide RNA, a PAMmer, etc.) has one or more LNA bases. In some embodiments, a subject nucleic acid (e.g., a Cas9 guide RNA, a PAMmer, etc.) has one or more nucleotides that are linked by a phosphorothioate bond (i.e., the subject nucleic acid has one or more phosphorothioate linkages). In some embodiments, a subject nucleic acid (e.g., a Cas9 guide RNA, a PAMmer, etc.) has a 5′ cap (e.g., a 7-methylguanylate cap (m7G)).

[0591] In some embodiments, a subject nucleic acid (e.g., a DNA or RNA encoding a variant Cas9 protein, a Cas9 guide RNA, a PAMmer, etc.) has a combination of modified nucleotides. For example, a subject nucleic acid can have a 5′ cap (e.g., a 7-methylguanylate cap (m7G)) in addition to having one or more nucleotides with other modifications (e.g., a 2′-O-Methyl nucleotide and/or a 2′ Fluoro modified nucleotide and/or a LNA base and/or a phosphorothioate linkage). A subject nucleic acid can have any combination of modifications. For example, a subject nucleic acid can have any combination of the above described modifications.

[0592] In some embodiments, a Cas9 guide RNA has one or more nucleotides that are 2′-O-Methyl modified nucleotides. In some embodiments, a Cas9 guide RNA has one or more 2′ Fluoro modified nucleotides. In some embodiments, a Cas9 guide RNA has one or more LNA bases. In some embodiments, a Cas9 guide RNA has one or more nucleotides that are linked by a phosphorothioate bond (i.e., the subject nucleic acid has one or more phosphorothioate linkages). In some embodiments, a Cas9 guide RNA has a 5′ cap (e.g., a 7-methylguanylate cap (m7G)).

[0593] In some embodiments, a Cas9 guide RNA has a combination of modified nucleotides. For example, a Cas9 guide RNA can have a 5′ cap (e.g., a 7-methylguanylate cap (m7G)) in addition to having one or more nucleotides with other modifications (e.g., a 2′-O-Methyl nucleotide and/or a 2′ Fluoro modified nucleotide and/or a LNA base and/or a phosphorothioate linkage). A Cas9 guide RNA can have any combination of modifications. For example, a Cas9 guide RNA can have any combination of the above described modifications.

[0594] In some embodiments, a subject PAMmer has one or more nucleotides that are 2′-O-Methyl modified nucleotides. In some embodiments, a subject PAMmer has one or more 2′ Fluoro modified nucleotides. In some embodiments, a subject PAMmer has one or more LNA bases. In some embodiments, a subject PAMmer has one or more nucleotides that are linked by a phosphorothioate bond (i.e., the subject nucleic acid has one or more phosphorothioate linkages). In some embodiments, a subject PAMmer has a 5′ cap (e.g., a 7-methylguanylate cap (m7G)). In some embodiments, a subject PAMmer has a combination of modified nucleotides. For example, a subject PAMmer can have a 5′ cap (e.g., a 7-methylguanylate cap (m7G)) in addition to having one or more nucleotides with other modifications (e.g., a 2′-O-Methyl nucleotide and/or a 2′ Fluoro modified nucleotide and/or a LNA base and/or a phosphorothioate linkage).

[0595] Modified Backbones and Modified Internucleoside Linkages

[0596] Examples of suitable nucleic acids containing modifications include nucleic acids containing modified backbones or non-natural internucleoside linkages. Nucleic acids having modified backbones include those that retain a phosphorus atom in the backbone and those that do not have a phosphorus atom in the backbone.

[0597] Suitable modified oligonucleotide backbones containing a phosphorus atom therein include, for example, phosphorothioates, chiral phosphorothioates, phosphorodithioates, phosphotriesters, aminoalkylphosphotriesters, methyl and other alkyl phosphonates including 3′-alkylene phosphonates, 5′-alkylene phosphonates and chiral phosphonates, phosphinates, phosphoramidates including 3′-amino phosphoramidate and aminoalkylphosphoramidates, phosphorodiamidates, thionophosphoramidates, thionoalkylphosphonates, thionoalkylphosphotriesters, selenophosphates and boranophosphates having normal 3′-5′ linkages, 2′-5′ linked analogs of these, and those having inverted polarity wherein one or more internucleotide linkages is a 3′ to 3′,5′ to 5′ or 2′ to 2′ linkage. Suitable oligonucleotides having inverted polarity comprise a single 3′ to 3′ linkage at the 3′-most internucleotide linkage i.e. a single inverted nucleoside residue which may be a basic (the nucleobase is missing or has a hydroxyl group in place thereof). Various salts (such as, for example, potassium or sodium), mixed salts and free acid forms are also included.

[0598] In some embodiments, a subject nucleic acid comprises one or more phosphorothioate and/or heteroatom internucleoside linkages, in particular —CH₂—NH—O—CH₂—, —CH₂—N(CH₃)—O—CH₂-(known as a methylene (methylimino) or MMI backbone), —CH₂—O—N(CH₃)—CH₂—, —CH₂—N(CH₃)—N(CH₃)—CH₂— and —O—N(CH₃)—CH₂—CH₂— (wherein the native phosphodiester internucleotide linkage is represented as —O—P(═O)(OH)—O—CH₂—). MMI type internucleoside linkages are disclosed in the above referenced U.S. Pat. No. 5,489,677. Suitable amide internucleoside linkages are disclosed in t U.S. Pat. No. 5,602,240.

[0599] Also suitable are nucleic acids having morpholino backbone structures as described in, e.g., U.S. Pat. No. 5,034,506. For example, in some embodiments, a subject nucleic acid comprises a 6-membered morpholino ring in place of a ribose ring. In some of these embodiments, a phosphorodiamidate or other non-phosphodiester internucleoside linkage replaces a phosphodiester linkage.

[0600] Suitable modified polynucleotide backbones that do not include a phosphorus atom therein have backbones that are formed by short chain alkyl or cycloalkyl internucleoside linkages, mixed heteroatom and alkyl or cycloalkyl internucleoside linkages, or one or more short chain heteroatomic or heterocyclic internucleoside linkages. These include those having morpholino linkages (formed in part from the sugar portion of a nucleoside); siloxane backbones; sulfide, sulfoxide and sulfone backbones; formacetyl and thioformacetyl backbones; methylene formacetyl and thioformacetyl backbones; riboacetyl backbones; alkene containing backbones; sulfamate backbones; methyleneimino and methylenehydrazino backbones; sulfonate and sulfonamide backbones; amide backbones; and others having mixed N, O, S and CH₂ component parts.

[0601] Mimetics

[0602] A subject nucleic acid can be a nucleic acid mimetic. The term “mimetic” as it is applied to polynucleotides is intended to include polynucleotides wherein only the furanose ring or both the furanose ring and the internucleotide linkage are replaced with non-furanose groups, replacement of only the furanose ring is also referred to in the art as being a sugar surrogate. The heterocyclic base moiety or a modified heterocyclic base moiety is maintained for hybridization with an appropriate target nucleic acid. One such nucleic acid, a polynucleotide mimetic that has been shown to have excellent hybridization properties, is referred to as a peptide nucleic acid (PNA). In PNA, the sugar-backbone of a polynucleotide is replaced with an amide containing backbone, in particular an aminoethylglycine backbone. The nucleotides are retained and are bound directly or indirectly to aza nitrogen atoms of the amide portion of the backbone.

[0603] One polynucleotide mimetic that has been reported to have excellent hybridization properties is a peptide nucleic acid (PNA). The backbone in PNA compounds is two or more linked aminoethylglycine units which gives PNA an amide containing backbone. The heterocyclic base moieties are bound directly or indirectly to aza nitrogen atoms of the amide portion of the backbone. Representative U.S. patents that describe the preparation of PNA compounds include, but are not limited to: U.S. Pat. Nos. 5,539,082; 5,714,331; and 5,719,262.

[0604] Another class of polynucleotide mimetic that has been studied is based on linked morpholino units (morpholino nucleic acid) having heterocyclic bases attached to the morpholino ring. A number of linking groups have been reported that link the morpholino monomeric units in a morpholino nucleic acid. One class of linking groups has been selected to give a non-ionic oligomeric compound. The non-ionic morpholino-based oligomeric compounds are less likely to have undesired interactions with cellular proteins. Morpholino-based polynucleotides are non-ionic mimics of oligonucleotides which are less likely to form undesired interactions with cellular proteins (Dwaine A. Braasch and David R. Corey, Biochemistry, 2002, 41(14), 4503-4510). Morpholino-based polynucleotides are disclosed in U.S. Pat. No. 5,034,506. A variety of compounds within the morpholino class of polynucleotides have been prepared, having a variety of different linking groups joining the monomeric subunits.

[0605] A further class of polynucleotide mimetic is referred to as cyclohexenyl nucleic acids (CeNA). The furanose ring normally present in a DNA/RNA molecule is replaced with a cyclohexenyl ring. CeNA DMT protected phosphoramidite monomers have been prepared and used for oligomeric compound synthesis following classical phosphoramidite chemistry. Fully modified CeNA oligomeric compounds and oligonucleotides having specific positions modified with CeNA have been prepared and studied (see Wang et al., J. Am. Chem. Soc., 2000, 122, 8595-8602). In general the incorporation of CeNA monomers into a DNA chain increases its stability of a DNA/RNA hybrid. CeNA oligoadenylates formed complexes with RNA and DNA complements with similar stability to the native complexes. The study of incorporating CeNA structures into natural nucleic acid structures was shown by NMR and circular dichroism to proceed with easy conformational adaptation.

[0606] A further modification includes Locked Nucleic Acids (LNAs) in which the 2′-hydroxyl group is linked to the 4′ carbon atom of the sugar ring thereby forming a 2′-C,4′-C-oxymethylene linkage thereby forming a bicyclic sugar moiety. The linkage can be a methylene (—CH₂—), group bridging the 2′ oxygen atom and the 4′ carbon atom wherein n is 1 or 2 (Singh et al., Chem. Commun., 1998, 4, 455-456). LNA and LNA analogs display very high duplex thermal stabilities with complementary DNA and RNA (Tm=+3 to +10° C.), stability towards 3′-exonucleolytic degradation and good solubility properties. Potent and nontoxic antisense oligonucleotides containing LNAs have been described (e.g., Wahlestedt et al., Proc. Natl. Acad. Sci. U.S.A., 2000, 97, 5633-5638).

[0607] The synthesis and preparation of the LNA monomers adenine, cytosine, guanine, 5-methylcytosine, thymine and uracil, along with their oligomerization, and nucleic acid recognition properties have been described (e.g., Koshkin et al., Tetrahedron, 1998, 54, 3607-3630). LNAs and preparation thereof are also described in WO 98/39352 and WO 99/14226, as well as U.S. applications 20120165514, 20100216983, 20090041809, 20060117410, 20040014959, 20020094555, and 20020086998.

### Modified Sugar Moieties

[0608] A subject nucleic acid can also include one or more substituted sugar moieties. Suitable polynucleotides comprise a sugar substituent group selected from: OH; F; O-, S-, or N-alkyl; O-, S-, or N-alkenyl; O-, S- or N-alkynyl; or O-alkyl-O-alkyl, wherein the alkyl, alkenyl and alkynyl may be substituted or unsubstituted C₁ to C₁₀ alkyl or C₂ to C₁₀ alkenyl and alkynyl. Particularly suitable are O((CH₂)ₙO)ₘCH₃, O(CH₂)ₙOCH₃, O(CH₂)ₙNH₂, O(CH₂)ₙCH₃, O(CH₂)ₙONH₂, and O(CH₂)ₙON((CH₂)ₙCH₃)₂, where n and m are from 1 to about 10. Other suitable polynucleotides comprise a sugar substituent group selected from: C₁ to C₁₀ lower alkyl, substituted lower alkyl, alkenyl, alkynyl, alkaryl, aralkyl, O-alkaryl or O-aralkyl, SH, SCH₃, OCN, Cl, Br, CN, CF₃, OCF₃, SOCH₃, SO₂CH₃, ONO₂, NO₂, N₃, NH₂, heterocycloalkyl, heterocycloalkaryl, aminoalkylamino, polyalkylamino, substituted silyl, an RNA cleaving group, a reporter group, an intercalator, a group for improving the pharmacokinetic properties of an oligonucleotide, or a group for improving the pharmacodynamic properties of an oligonucleotide, and other substituents having similar properties. A suitable modification includes 2′-methoxyethoxy (2′-O—CH₂CH₂OCH₃, also known as 2′-O-(2-methoxyethyl) or 2′-MOE) (Martin et al., Helv. Chim. Acta, 1995, 78, 486-504) i.e., an alkoxyalkoxy group. A further suitable modification includes 2′-dimethylaminooxyethoxy, i.e., a O(CH₂)₂ON(CH₃)₂ group, also known as 2′-DMAOE, as described in examples herein below, and 2′-dimethylaminoethoxyethoxy (also known in the art as 2′-O-dimethyl-amino-ethoxy-ethyl or 2′-DMAEOE), i.e., 2′-O—CH₂—O—CH₂—N(CH₃)₂.

[0609] Other suitable sugar substituent groups include methoxy (—O—CH₃), aminopropoxy (—OCH₂CH₂CH₂NH₂), allyl (—CH₂—CH═CH₂), —O-allyl (—O—CH₂—CH═CH₂) and fluoro (F). 2′-sugar substituent groups may be in the arabino (up) position or ribo (down) position. A suitable 2′-arabino modification is 2′-F. Similar modifications may also be made at other positions on the oligomeric compound, particularly the 3′ position of the sugar on the 3′ terminal nucleoside or in 2′-5′ linked oligonucleotides and the 5′ position of 5′ terminal nucleotide. Oligomeric compounds may also have sugar mimetics such as cyclobutyl moieties in place of the pentofuranosyl sugar.

### Base Modifications and Substitutions

[0610] A subject nucleic acid may also include nucleobase (often referred to in the art simply as “base”) modifications or substitutions. As used herein, “unmodified” or “natural” nucleobases include the purine bases adenine (A) and guanine (G), and the pyrimidine bases thymine (T), cytosine (C) and uracil (U). Modified nucleobases include other synthetic and natural nucleobases such as 5-methylcytosine (5-me-C), 5-hydroxymethyl cytosine, xanthine, hypoxanthine, 2-aminoadenine, 6-methyl and other alkyl derivatives of adenine and guanine, 2-propyl and other alkyl derivatives of adenine and guanine, 2-thiouracil, 2-thiothymine and 2-thiocytosine, 5-halouracil and cytosine, 5-propynyl (—C═C—CH₃) uracil and cytosine and other alkynyl derivatives of pyrimidine bases, 6-azo uracil, cytosine and thymine, 5-uracil (pseudouracil), 4-thiouracil, 8-halo, 8-amino, 8-thiol, 8-thioalkyl, 8-hydroxyl and other 8-substituted adenines and guanines, 5-halo particularly 5-bromo, 5-trifluoromethyl and other 5-substituted uracils and cytosines, 7-methylguanine and 7-methyladenine, 2-F-adenine, 2-aminoadenine, 8-azaguanine and 8-azaadenine, 7-deazaguanine and 7-deazaadenine and 3-deazaguanine and 3-deazaadenine. Further modified nucleobases include tricyclic pyrimidines such as phenoxazine cytidine(1H-pyrimido(5,4-b)(1,4)benzoxazin-2(3H)-one), phenothiazine cytidine (1H-pyrimido(5,4-b)(1,4)benzothiazin-2(3H)-one), G-clamps such as a substituted phenoxazine cytidine (e.g. 9-(2-aminoethoxy)-H-pyrimido(5,4-(b) (1,4)benzoxazin-2(3H)-one), carbazole cytidine (2H-pyrimido(4,5-b)indol-2-one), pyridoindole cytidine (H-pyrido(3′,2′:4,5)pyrrolo(2,3-d)pyrimidin-2-one).

[0611] Heterocyclic base moieties may also include those in which the purine or pyrimidine base is replaced with other heterocycles, for example 7-deaza-adenine, 7-deazaguanosine, 2-aminopyridine and 2-pyridone. Further nucleobases include those disclosed in U.S. Pat. No. 3,687,808, those disclosed in The Concise Encyclopedia Of Polymer Science And Engineering, pages 858-859, Kroschwitz, J. I., ed. John Wiley & Sons, 1990, those disclosed by Englisch et al., Angewandte Chemie, International Edition, 1991, 30, 613, and those disclosed by Sanghvi, Y. S., Chapter 15, Antisense Research and Applications, pages 289-302, Crooke, S. T. and Lebleu, B., ed., CRC Press, 1993. Certain of these nucleobases are useful for increasing the binding affinity of an oligomeric compound. These include 5-substituted pyrimidines, 6-azapyrimidines and N-2, N-6 and O-6 substituted purines, including 2-aminopropyladenine, 5-propynyluracil and 5-propynylcytosine. 5-methylcytosine substitutions have been shown to increase nucleic acid duplex stability by 0.6-1.2° C. (Sanghvi et al., eds., Antisense Research and Applications, CRC Press, Boca Raton, 1993, pp. 276-278) and are suitable base substitutions, e.g., when combined with 2′-O-methoxyethyl sugar modifications.

[0612] Conjugates

[0613] Another possible modification of a subject nucleic acid involves chemically linking to the polynucleotide one or more moieties or conjugates which enhance the activity, cellular distribution or cellular uptake of the oligonucleotide. These moieties or conjugates can include conjugate groups covalently bound to functional groups such as primary or secondary hydroxyl groups. Conjugate groups include, but are not limited to, intercalators, reporter molecules, polyamines, polyamides, polyethylene glycols, polyethers, groups that enhance the pharmacodynamic properties of oligomers, and groups that enhance the pharmacokinetic properties of oligomers. Suitable conjugate groups include, but are not limited to, cholesterols, lipids, phospholipids, biotin, phenazine, folate, phenanthridine, anthraquinone, acridine, fluoresceins, rhodamines, coumarins, and dyes. Groups that enhance the pharmacodynamic properties include groups that improve uptake, enhance resistance to degradation, and/or strengthen sequence-specific hybridization with the target nucleic acid. Groups that enhance the pharmacokinetic properties include groups that improve uptake, distribution, metabolism or excretion of a subject nucleic acid.

[0614] Conjugate moieties include but are not limited to lipid moieties such as a cholesterol moiety (Letsinger et al., Proc. Natl. Acad. Sci. USA, 1989, 86, 6553-6556), cholic acid (Manoharan et al., Bioorg. Med. Chem. Let., 1994, 4, 1053-1060), a thioether, e.g., hexyl-S-tritylthiol (Manoharan et al., Ann. N.Y. Acad. Sci., 1992, 660, 306-309; Manoharan et al., Bioorg. Med. Chem. Let., 1993, 3, 2765-2770), a thiocholesterol (Oberhauser et al., Nucl. Acids Res., 1992, 20, 533-538), an aliphatic chain, e.g., dodecandiol or undecyl residues (Saison-Behmoaras et al., EMBO J., 1991, 10, 1111-1118; Kabanov et al., FEBS Lett., 1990, 259, 327-330; Svinarchuk et al., Biochimie, 1993, 75, 49-54), a phospholipid, e.g., di-hexadecyl-rac-glycerol or triethylammonium 1,2-di-O-hexadecyl-rac-glycero-3-H-phosphonate (Manoharan et al., Tetrahedron Lett., 1995, 36, 3651-3654; Shea et al., Nucl. Acids Res., 1990, 18, 3777-3783), a polyamine or a polyethylene glycol chain (Manoharan et al., Nucleosides & Nucleotides, 1995, 14, 969-973), or adamantane acetic acid (Manoharan et al., Tetrahedron Lett., 1995, 36, 3651-3654), a palmityl moiety (Mishra et al., Biochim. Biophys. Acta, 1995, 1264, 229-237), or an octadecylamine or hexylamino-carbonyl-oxycholesterol moiety (Crooke et al., J. Pharmacol. Exp. Ther., 1996, 277, 923-937.

[0615] A conjugate may include a “Protein Transduction Domain” or PTD (also known as a CPP—cell penetrating peptide), which may refer to a polypeptide, polynucleotide, carbohydrate, or organic or inorganic compound that facilitates traversing a lipid bilayer, micelle, cell membrane, organelle membrane, or vesicle membrane. A PTD attached to another molecule, which can range from a small polar molecule to a large macromolecule and/or a nanoparticle, facilitates the molecule traversing a membrane, for example going from extracellular space to intracellular space, or cytosol to within an organelle. In some cases, a PTD attached to another molecule facilitates entry of the molecule into the nucleus (e.g., in some cases, a PTD includes a nuclear localization signal). In some embodiments, a PTD is covalently linked to the amino terminus of an exogenous polypeptide (e.g., a Cas9 protein). In some embodiments, a PTD is covalently linked to the carboxyl terminus of an exogenous polypeptide (e.g., a Cas9 protein). In some embodiments, a PTD is covalently linked to the amino terminus and to the carboxyl terminus of an exogenous polypeptide (e.g., a Cas9 protein). In some embodiments, a PTD is covalently linked to a nucleic acid (e.g., a Cas9 guide RNA, a polynucleotide encoding a Cas9 guide RNA, a polynucleotide encoding a Cas9 protein, etc.). Exemplary PTDs include but are not limited to a minimal undecapeptide protein transduction domain (corresponding to residues 47-57 of HIV-1 TAT comprising YGRKKRRQRRR; SEQ ID NO:264); a polyarginine sequence comprising a number of arginines sufficient to direct entry into a cell (e.g., 3, 4, 5, 6, 7, 8, 9, 10, or 10-50 arginines); a VP22 domain (Zender et al. (2002) Cancer Gene Ther. 9(6):489-96); an Drosophila Antennapedia protein transduction domain (Noguchi et al. (2003) Diabetes 52(7):1732-1737); a truncated human calcitonin peptide (Trehin et al. (2004) Pharm. Research 21:1248-1256); polylysine (Wender et al. (2000) Proc. Natl. Acad. Sci. USA 97:13003-13008); RRQRRTSKLMKR (SEQ ID NO:265); Transportan GWTLNSAGYLLGKINLKALAALAKKIL (SEQ ID NO:266); KALAWEAKLAKALAKALAKHLAKALAKALKCEA (SEQ ID NO:267); and RQIKIWFQNRRMKWKK (SEQ ID NO:268). Exemplary PTDs include but are not limited to, YGRKKRRQRRR (SEQ ID NO:264), RKKRRQRRR (SEQ ID NO:269); an arginine homopolymer of from 3 arginine residues to 50 arginine residues; Exemplary PTD domain amino acid sequences include, but are not limited to, any of the following: YGRKKRRQRRR (SEQ ID NO:264); RKKRRQRR (SEQ ID NO:270); YARAAARQARA (SEQ ID NO:271); THRLPRRRRRR (SEQ ID NO:272); and GGRRARRRRRR (SEQ ID NO:273). In some embodiments, the PTD is an activatable CPP (ACPP) (Aguilera et al. (2009) Integr Biol (Camb) June; 1(5-6): 371-381). ACPPs comprise a polycationic CPP (e.g., Arg9 or “R9”) connected via a cleavable linker to a matching polyanion (e.g., Glu9 or “E9”), which reduces the net charge to nearly zero and thereby inhibits adhesion and uptake into cells. Upon cleavage of the linker, the polyanion is released, locally unmasking the polyarginine and its inherent adhesiveness, thus “activating” the ACPP to traverse the membrane.

### Additional Examples

[0616] Additional targeters, activators, Cas9 proteins (including variant Cas9 proteins), Cas9 guide RNAs, and methods of using the same, can be found in the literature (see, for example, Chylinski et al., RNA Biol. 2013 May; 10(5):726-37; Jinek et al., Science. 2012 Aug. 17; 337(6096):816-21; Ma et al., Biomed Res Int. 2013; 2013:270805; Hou et al., Proc Natl Acad Sci USA. 2013 Sep. 24; 110(39):15644-9; Jinek et al., Elife. 2013; 2:e00471; Pattanayak et al., Nat Biotechnol. 2013 Sep; 31(9):839-43; Qi et al, Cell. 2013 Feb. 28; 152(5):1173-83; Wang et al., Cell. 2013 May 9; 153(4):910-8; Auer et. al., Genome Res. 2013 Oct. 31; Chen et. al., Nucleic Acids Res. 2013 Nov. 1; 41(20):e19; Cheng et. al., Cell Res. 2013 October; 23(10):1163-71; Cho et. al., Genetics. 2013 November; 195(3):1177-80; DiCarlo et al., Nucleic Acids Res. 2013 April; 41(7):4336-43; Dickinson et. al., Nat Methods. 2013 October; 10(10):1028-34; Ebina et. al., Sci Rep. 2013; 3:2510; Fujii et. al, Nucleic Acids Res. 2013 Nov. 1; 41(20):e187; Hu et. al., Cell Res. 2013 November; 23(11):1322-5; Jiang et. al., Nucleic Acids Res. 2013 Nov. 1; 41(20):e188; Larson et. al., Nat Protoc. 2013 November; 8(11):2180-96; Mali et. al., Nat Methods. 2013 October; 10(10):957-63; Nakayama et. al., Genesis. 2013 December; 51(12):835-43; Ran et. al., Nat Protoc. 2013 November; 8(11):2281-308; Ran et. al., Cell. 2013 Sep. 12; 154(6):1380-9; Upadhyay et. al., G3 (Bethesda). 2013 Dec. 9; 3(12):2233-8; Walsh et. al., Proc Natl Acad Sci USA. 2013 Sep. 24; 110(39):15514-5; Xie et. al., Mol Plant. 2013 Oct. 9; Yang et. al., Cell. 2013 Sep. 12; 154(6):1370-9; and U.S. patents and patent applications: U.S. Pat. Nos. 8,906,616; 8,895,308; 8,889,418; 8,889,356; 8,871,445; 8,865,406; 8,795,965; 8,771,945; 8,697,359; 20140068797; 20140170753; 20140179006; 20140179770; 20140186843; 20140186919; 20140186958; 20140189896; 20140227787; 20140234972; 20140242664; 20140242699; 20140242700; 20140242702; 20140248702; 20140256046; 20140273037; 20140273226; 20140273230; 20140273231; 20140273232; 20140273233; 20140273234; 20140273235; 20140287938; 20140295556; 20140295557; 20140298547; 20140304853; 20140309487; 20140310828; 20140310830; 20140315985; 20140335063; 20140335620; 20140342456; 20140342457; 20140342458; 20140349400; 20140349405; 20140356867; 20140356956; 20140356958; 20140356959; 20140357523; 20140357530; 20140364333; and 20140377868; all of which are hereby incorporated by reference in their entirety.

### Host Cells

[0617] The present disclosure provides host cells comprising (e.g., genetically modified to comprise) a nucleic acid of the present disclosure (e.g., a nucleic acid encoding a subject variant Cas9 protein). A genetically modified cell (a host cell) can be permanently modified (e.g., if a sequence encoding a variant Cas9 protein is integrated into the genome of the cell, or is present on an extrachromosomal nucleic acid that is stable and remains in the cell, etc.), or can be temporarily modified (e.g., the cell can comprise an mRNA encoding the variant Cas9 protein, the cell can comprise a DNA encoding that variant Cas9 protein that is not stably integrated into the cell's genome, e.g., is present on a extrachromosomal nucleic acid this is not permanent). In other words, a cell comprising a nucleic acid (mRNA or DNA) encoding a subject variant Cas9 protein is a genetically modified host cell. The present disclosure provides host cells comprising (e.g., genetically modified to comprise) a recombinant vector of the present disclosure.

[0618] Suitable host cells include, e.g. a bacterial cell; an archaeal cell; a cell of a single-cell eukaryotic organism; a plant cell; an algal cell, e.g., Botryococcus braunii, Chlamydomonas reinhardtii, Nannochloropsis gaditana, Chlorella pyrenoidosa, Sargassum patens C. Agardh, and the like; a fungal cell (e.g., a yeast cell); an animal cell; a cell from an invertebrate animal (e.g. fruit fly, cnidarian, echinoderm, nematode, etc.); a cell from a vertebrate animal (e.g., fish, amphibian, reptile, bird, mammal); a cell from a mammal (e.g., a cell from a rodent, a cell from a human, etc.); and the like.

[0619] A suitable host cell can be a stem cell (e.g. an embryonic stem (ES) cell, an induced pluripotent stem (iPS) cell); a germ cell; a somatic cell, e.g. a fibroblast, a hematopoietic cell, a neuron, a muscle cell, a bone cell, a hepatocyte, a pancreatic cell; an in vitro or in vivo embryonic cell of an embryo at any stage, e.g., a 1-cell, 2-cell, 4-cell, 8-cell, etc. stage zebrafish embryo; etc.). Cells may be from established cell lines or they may be primary cells, where “primary cells”, “primary cell lines”, and “primary cultures” are used interchangeably herein to refer to cells and cells cultures that have been derived from a subject and allowed to grow in vitro for a limited number of passages, i.e. splittings, of the culture. For example, primary cultures include cultures that may have been passaged 0 times, 1 time, 2 times, 4 times, 5 times, 10 times, or 15 times, but not enough times go through the crisis stage. Primary cell lines can be maintained for fewer than 10 passages in vitro. Host cells are in many cases unicellular organisms, or are grown in culture.

[0620] If the cells are primary cells, they may be harvest from an organism (e.g., an individual) by any convenient method. For example, leukocytes may be conveniently harvested by apheresis, leukocytapheresis, density gradient separation, etc., while cells from tissues such as skin, muscle, bone marrow, spleen, liver, pancreas, lung, intestine, stomach, etc. are most conveniently harvested by biopsy. An appropriate solution may be used for dispersion or suspension of the harvested cells. Such solution will generally be a balanced salt solution, e.g. normal saline, phosphate-buffered saline (PBS), Hank's balanced salt solution, etc., conveniently supplemented with fetal calf serum or other naturally occurring factors, in conjunction with an acceptable buffer at low concentration, e.g., from 5-25 mM. Convenient buffers include HEPES, phosphate buffers, lactate buffers, etc. The cells may be used immediately, or they may be stored, frozen, for long periods of time, being thawed and capable of being reused. In such cases, the cells can be frozen in 10% dimethyl sulfoxide (DMSO), 50% serum, 40% buffered medium, or some other such solution as is commonly used in the art to preserve cells at such freezing temperatures, and thawed in a manner as commonly known in the art for thawing frozen cultured cells.

[0621] In some cases, a subject genetically modified host cell is in vitro. In some cases, a subject genetically modified host cell is in vivo. In some cases, a subject genetically modified host cell is a prokaryotic cell or is derived from a prokaryotic cell. In some cases, a subject genetically modified host cell is a bacterial cell or is derived from a bacterial cell. In some cases, a subject genetically modified host cell is an archaeal cell or is derived from an archaeal cell. In some cases, a subject genetically modified host cell is a eukaryotic cell or is derived from a eukaryotic cell. In some cases, a subject genetically modified host cell is a plant cell or is derived from a plant cell. In some cases, a subject genetically modified host cell is an animal cell or is derived from an animal cell. In some cases, a subject genetically modified host cell is an invertebrate cell or is derived from an invertebrate cell. In some cases, a subject genetically modified host cell is a vertebrate cell or is derived from a vertebrate cell. In some cases, a subject genetically modified host cell is a mammalian cell or is derived from a mammalian cell. In some cases, a subject genetically modified host cell is a rodent cell or is derived from a rodent cell. In some embodiments, a subject genetically modified host cell is a human cell or is derived from a human cell.

[0622] The present disclosure further provides progeny of a subject genetically modified cell, where the progeny can comprise the same exogenous nucleic acid or polypeptide as the subject genetically modified cell from which it was derived. The present disclosure further provides a composition comprising a subject genetically modified host cell.

### Non-Human Genetically Modified Organisms

[0623] In some embodiments, a genetically modified host cell has been genetically modified with an exogenous nucleic acid comprising a nucleotide sequence encoding a Cas9 protein (e.g., a subject variant Cas9 protein). If such a cell is a eukaryotic single-cell organism, then the modified cell can be considered a genetically modified organism. In some embodiments, subject non-human genetically modified organism is a Cas9 transgenic multicellular organism.

[0624] In some embodiments, a subject genetically modified non-human host cell (e.g., a cell that has been genetically modified with an exogenous nucleic acid comprising a nucleotide sequence encoding a subject Cas9 protein (e.g., a subject variant Cas9 protein) can generate a subject genetically modified non-human organism (e.g., a mouse, a fish, a frog, a fly, a worm, etc.). For example, if the genetically modified host cell is a pluripotent stem cell (i.e., PSC) or a germ cell (e.g., sperm, oocyte, etc.), an entire genetically modified organism can be derived from the genetically modified host cell. In some embodiments, the genetically modified host cell is a pluripotent stem cell (e.g., embryonic stem cell (ESC), induced pluripotent stem cell (iPSC), pluripotent plant stem cell, etc.) or a germ cell (e.g., sperm cell, oocyte, etc.), either in vivo or in vitro, that can give rise to a genetically modified organism. In some embodiments the genetically modified host cell is a vertebrate PSC (e.g., ESC, iPSC, etc.) and is used to generate a genetically modified organism (e.g. by injecting a PSC into a blastocyst to produce a chimeric/mosaic animal, which could then be mated to generate non-chimeric/non-mosaic genetically modified organisms; grafting in the case of plants; etc.). Any convenient method/protocol for producing a genetically modified organism is suitable for producing a genetically modified host cell comprising an exogenous nucleic acid comprising a nucleotide sequence encoding a subject Cas9 protein (e.g., a subject variant Cas9 protein). Methods of producing genetically modified organisms are known in the art. For example, see Cho et al., Curr Protoc Cell Biol. 2009 March; Chapter 19:Unit 19.11: Generation of transgenic mice; Gama et al., Brain Struct Funct. 2010 March; 214(2-3):91-109. Epub 2009 Nov. 25: Animal transgenesis: an overview; Husaini et al., GM Crops. 2011 June-December; 2(3):150-62. Epub 2011 Jun. 1: Approaches for gene targeting and targeted gene expression in plants.

[0625] In some embodiments, a genetically modified organism comprises a target cell for methods of the invention, and thus can be considered a source for target cells. For example, if a genetically modified cell comprising one or more exogenous nucleic acids comprising nucleotide sequences encoding a Cas9 protein (e.g., a subject variant Cas9 protein) is used to generate a genetically modified organism, then the cells of the genetically modified organism comprise the one or more exogenous nucleic acids comprising nucleotide sequences encoding the Cas9 protein (e.g., a subject variant Cas9 protein). In some such embodiments, nucleic acid (e.g., DNA) within a cell or cells of the genetically modified organism can be targeted for modification by introducing into the cell or cells a Cas9 guide RNA (e.g., a truncated Cas9 guide RNA) (or a nucleic acid encoding the Cas9 guide RNA), and in some cases a PAMmer and/or a donor polynucleotide. For example, the introduction of a Cas9 guide RNA (or a DNA encoding the same) into a subset of cells (e.g., brain cells, intestinal cells, kidney cells, lung cells, blood cells, etc.) of the genetically modified organism can target the DNA of such cells for modification, the genomic location of which will depend on the targeting sequence of the introduced Cas9 guide RNA.

[0626] In some embodiments, a genetically modified organism is a source of target cells for methods of the invention. For example, a genetically modified organism comprising cells that are genetically modified with an exogenous nucleic acid comprising a nucleotide sequence encoding a Cas9 protein (e.g., a subject variant Cas9 protein) can provide a source of genetically modified cells, for example PSCs (e.g., ESCs, iPSCs, sperm, oocytes, etc.), neurons, progenitor cells, cardiomyocytes, etc.

[0627] In some embodiments, a genetically modified cell is a PSC comprising an exogenous nucleic acid comprising a nucleotide sequence encoding a subject Cas9 protein (e.g., a subject variant Cas9 protein). As such, the PSC can be a target cell such that the DNA of the PSC can be targeted for modification by introducing into the PSC a Cas9 guide RNA (e.g., a truncated Cas9 guide RNA) (or a nucleic acid encoding the Cas9 guide RNA) and in some cases a PAMmer and/or a donor polynucleotide, and the genomic location of the modification will depend on the targeting sequence of the introduced Cas9 guide RNA. Thus, in some embodiments, the methods described herein can be used to modify nucleic acid (e.g., DNA) (e.g., delete and/or replace any desired genomic location) within PSCs derived from a subject genetically modified organism. Such modified PSCs can then be used to generate organisms having both (i) an exogenous nucleic acid comprising a nucleotide sequence encoding a Cas9 protein (e.g., a subject variant Cas9 protein) and (ii) a DNA modification that was introduced into the PSC.

[0628] An exogenous nucleic acid comprising a nucleotide sequence encoding a Cas9 protein (e.g., a subject variant Cas9 protein) can be under the control of (i.e., operably linked to) an unknown promoter (e.g., when the nucleic acid randomly integrates into a host cell genome) or can be under the control of (i.e., operably linked to) a known promoter. Suitable known promoters can be any known promoter and include constitutively active promoters (e.g., CMV promoter), inducible promoters (e.g., heat shock promoter, Tetracycline-regulated promoter, Steroid-regulated promoter, Metal-regulated promoter, estrogen receptor-regulated promoter, etc.), spatially restricted and/or temporally restricted promoters (e.g., a tissue specific promoter, a cell type specific promoter, etc.), etc.

[0629] A subject genetically modified non-human organism can be any organism other than a human, including for example, a plant; algae; an invertebrate (e.g., a cnidarian, an echinoderm, a worm, a fly, etc.); an insect; an arachnid; a vertebrate (e.g., a fish (e.g., zebrafish, puffer fish, gold fish, etc.), an amphibian (e.g., salamander, frog, etc.), a reptile, a bird, a mammal, etc.); an ungulate (e.g., a goat, a pig, a sheep, a cow, etc.); a rodent (e.g., a mouse, a rat, a hamster, a guinea pig); a lagomorpha (e.g., a rabbit); etc.

### Transgenic Non-Human Animals

[0630] As described above, in some embodiments, a subject nucleic acid (e.g., one or more nucleic acids comprising nucleotide sequences encoding a Cas9 protein, e.g., a subject variant Cas9 protein) (e.g., a recombinant expression vector) is used as a transgene to generate a transgenic animal that produces a Cas9 protein, e.g., a subject variant Cas9 protein). Thus, the present disclosure further provides a transgenic non-human animal, which animal comprises a transgene comprising a subject nucleic acid comprising a nucleotide sequence encoding a Cas9 protein (e.g., a subject variant Cas9 protein) (e.g., one or more nucleic acids comprising nucleotide sequences encoding a subject variant Cas9 protein). In some embodiments, the genome of the transgenic non-human animal comprises a subject nucleotide sequence encoding a Cas9 protein (e.g., a subject variant Cas9 protein). In some embodiments, the transgenic non-human animal is homozygous for the genetic modification. In some embodiments, the transgenic non-human animal is heterozygous for the genetic modification. In some embodiments, the transgenic non-human animal is a vertebrate, for example, a fish (e.g., zebra fish, gold fish, puffer fish, cave fish, etc.), an amphibian (frog, salamander, etc.), a bird (e.g., chicken, turkey, etc.), a reptile (e.g., snake, lizard, etc.), a mammal (e.g., an ungulate, e.g., a pig, a cow, a goat, a sheep, etc.; a lagomorph (e.g., a rabbit); a rodent (e.g., a rat, a mouse); a non-human primate; etc.), etc.

[0631] Nucleotide sequences encoding a Cas9 protein (e.g., a subject variant Cas9 protein) (e.g., one or more nucleic acids comprising nucleotide sequences encoding a Cas9 protein, e.g., a subject variant Cas9 protein), can be under the control of (i.e., operably linked to) an unknown promoter (e.g., when the nucleic acid randomly integrates into a host cell genome) or can be under the control of (i.e., operably linked to) a known promoter. Suitable known promoters can be any known promoter and include constitutively active promoters (e.g., CMV promoter), inducible promoters (e.g., heat shock promoter, Tetracycline-regulated promoter, Steroid-regulated promoter, Metal-regulated promoter, estrogen receptor-regulated promoter, etc.), spatially restricted and/or temporally restricted promoters (e.g., a tissue specific promoter, a cell type specific promoter, etc.), etc.

### Transgenic Plants

[0632] As described above, in some embodiments, a subject nucleic acid (e.g., one or more nucleic acids comprising nucleotide sequences encoding a subject Cas9 protein (e.g., a subject variant Cas9 protein)(e.g., a recombinant expression vector) is used as a transgene to generate a transgenic plant that produces a Cas9 protein (e.g., a subject variant Cas9 protein). Thus, the present disclosure further provides a transgenic plant, which plant comprises a transgene comprising a subject nucleic acid comprising a nucleotide sequence encoding a Cas9 protein (e.g., a subject variant Cas9 protein) (e.g., one or more nucleic acids comprising nucleotide sequences encoding a Cas9 protein, e.g., a subject variant Cas9 protein). In some embodiments, the genome of the transgenic plant comprises a subject nucleic acid. In some embodiments, the transgenic plant is homozygous for the genetic modification. In some embodiments, the transgenic plant is heterozygous for the genetic modification.

[0633] Methods of introducing exogenous nucleic acids into plant cells are well known in the art. Such plant cells are considered “transformed,” as defined above. Suitable methods include viral infection (such as double stranded DNA viruses), transfection, conjugation, protoplast fusion, electroporation, particle gun technology, calcium phosphate precipitation, direct microinjection, silicon carbide whiskers technology, Agrobacterium-mediated transformation and the like. The choice of method is generally dependent on the type of cell being transformed and the circumstances under which the transformation is taking place (i.e. in vitro, ex vivo, or in vivo).

[0634] Transformation methods based upon the soil bacterium Agrobacterium tumefaciens are particularly useful for introducing an exogenous nucleic acid molecule into a vascular plant. The wild type form of Agrobacterium contains a Ti (tumor-inducing) plasmid that directs production of tumorigenic crown gall growth on host plants. Transfer of the tumor-inducing T-DNA region of the Ti plasmid to a plant genome requires the Ti plasmid-encoded virulence genes as well as T-DNA borders, which are a set of direct DNA repeats that delineate the region to be transferred. An Agrobacterium-based vector is a modified form of a Ti plasmid, in which the tumor inducing functions are replaced by the nucleic acid sequence of interest to be introduced into the plant host.

[0635] Agrobacterium-mediated transformation generally employs cointegrate vectors or binary vector systems, in which the components of the Ti plasmid are divided between a helper vector, which resides permanently in the Agrobacterium host and carries the virulence genes, and a shuttle vector, which contains the gene of interest bounded by T-DNA sequences. A variety of binary vectors are well known in the art and are commercially available, for example, from Clontech (Palo Alto, Calif.). Methods of coculturing Agrobacterium with cultured plant cells or wounded tissue such as leaf tissue, root explants, hypocotyledons, stem pieces or tubers, for example, also are well known in the art. See., e.g., Glick and Thompson, (eds.), Methods in Plant Molecular Biology and Biotechnology, Boca Raton, Fla.: CRC Press (1993).

[0636] Microprojectile-mediated transformation also can be used to produce a subject transgenic plant. This method, first described by Klein et al. (Nature 327:70-73 (1987)), relies on microprojectiles such as gold or tungsten that are coated with the desired nucleic acid molecule by precipitation with calcium chloride, spermidine or polyethylene glycol. The microprojectile particles are accelerated at high speed into an angiosperm tissue using a device such as the BIOLISTIC PD-1000 (Biorad; Hercules Calif.).

[0637] A subject nucleic acid may be introduced into a plant in a manner such that the nucleic acid is able to enter a plant cell(s), e.g., via an in vivo or ex vivo protocol. By “in vivo,” it is meant in the nucleic acid is administered to a living body of a plant e.g. infiltration. By “ex vivo” it is meant that cells or explants are modified outside of the plant, and then such cells or organs are regenerated to a plant. A number of vectors suitable for stable transformation of plant cells or for the establishment of transgenic plants have been described, including those described in Weissbach and Weissbach, (1989) Methods for Plant Molecular Biology Academic Press, and Gelvin et al., (1990) Plant Molecular Biology Manual, Kluwer Academic Publishers. Specific examples include those derived from a Ti plasmid of Agrobacterium tumefaciens, as well as those disclosed by Herrera-Estrella et al. (1983) Nature 303: 209, Bevan (1984) Nucl Acid Res. 12: 8711-8721, Klee (1985) Bio/Technolo 3: 637-642. Alternatively, non-Ti vectors can be used to transfer the DNA into plants and cells by using free DNA delivery techniques. By using these methods transgenic plants such as wheat, rice (Christou (1991) Bio/Technology 9:957-9 and 4462) and corn (Gordon-Kamm (1990) Plant Cell 2: 603-618) can be produced. An immature embryo can also be a good target tissue for monocots for direct DNA delivery techniques by using the particle gun (Weeks et al. (1993) Plant Physiol 102: 1077-1084; Vasil (1993) Bio/Technolo 10: 667-674; Wan and Lemeaux (1994) Plant Physiol 104: 37-48 and for Agrobacterium-mediated DNA transfer (Ishida et al. (1996) Nature Biotech 14: 745-750). Exemplary methods for introduction of DNA into chloroplasts are biolistic bombardment, polyethylene glycol transformation of protoplasts, and microinjection (Danieli et al Nat. Biotechnol 16:345-348, 1998; Staub et al Nat. Biotechnol 18: 333-338, 2000; O'Neill et al Plant J. 3:729-738, 1993; Knoblauch et al Nat. Biotechnol 17: 906-909; U.S. Pat. Nos. 5,451,513, 5,545,817, 5,545,818, and 5,576,198; in Intl. Application No. WO 95/16783; and in Boynton et al., Methods in Enzymology 217: 510-536 (1993), Svab et al., Proc. Natl. Acad. Sci. USA 90: 913-917 (1993), and McBride et al., Proc. Nati. Acad. Sci. USA 91: 7301-7305 (1994)). Any vector suitable for the methods of biolistic bombardment, polyethylene glycol transformation of protoplasts and microinjection will be suitable as a targeting vector for chloroplast transformation. Any double stranded DNA vector may be used as a transformation vector, especially when the method of introduction does not utilize Agrobacterium.

[0638] Plants which can be genetically modified include grains, forage crops, fruits, vegetables, oil seed crops, palms, forestry, and vines. Specific examples of plants which can be modified follow: maize, banana, peanut, field peas, sunflower, tomato, canola, tobacco, wheat, barley, oats, potato, soybeans, cotton, carnations, sorghum, lupin and rice.

[0639] Also provided by the subject disclosure are transformed plant cells, tissues, plants and products that contain the transformed plant cells. A feature of the subject transformed cells, and tissues and products that include the same is the presence of a subject nucleic acid integrated into the genome, and production by plant cells of a Cas9 protein (e.g., a subject variant Cas9 protein). Recombinant plant cells of the present invention are useful as populations of recombinant cells, or as a tissue, seed, whole plant, stem, fruit, leaf, root, flower, stem, tuber, grain, animal feed, a field of plants, and the like.

[0640] Nucleotide sequences encoding a Cas9 protein (e.g., a subject variant Cas9 protein) can be under the control of (i.e., operably linked to) an unknown promoter (e.g., when the nucleic acid randomly integrates into a host cell genome) or can be under the control of (i.e., operably linked to) a known promoter. Suitable known promoters can be any known promoter and include constitutively active promoters, inducible promoters, spatially restricted and/or temporally restricted promoters, etc.

### Methods

[0641] A variant Cas9 protein (a reporter Cas9 protein) of the present disclosure finds use in a variety of methods. For example, a subject reporter Cas9 protein can be used in any method that a Cas9 protein can be used where detection of a conformational change of the reporter Cas9 protein is desired (e.g., depending on the configuration of a reporter Cas9 protein, e.g., whether the signal partners are configured to detect Cas9 binding to an appropriate guide RNA, whether the signal partners are configured to detect a Cas9 complex that includes a subject reporter Cas9 protein and a Cas9 guide RNA binding on-target to target nucleic acid, etc.). For example, a subject reporter Cas9 guide RNA can be used to screen a library (a plurality) of candidate guide RNAs for those that bind to the reporter Cas9 guide, thus producing a change in signal. As another example, a subject reporter Cas9 guide RNA can be used to determine whether a particular target sequence is present in target nucleic acid (e.g., SNP detection, detection of a particular disease-associated allele, detection of a chromosome translocation, etc.), how many copies of a target sequence are present in a target nucleic acid (e.g., via quantification of the change in signal, via imaging, etc.), and where a target sequence is located within a target nucleic acid (e.g., via imaging). Such methods can be performed in vitro outside of a cell (e.g., from a cellular extract), in vitro inside of a cell (living or dead, e.g., fixed), ex vivo inside of a cell (living or dead, e.g., fixed), or in vivo.

[0642] A variant Cas9 protein (e.g., a reporter Cas9 protein) can be used to (i) modify (e.g., cleave, e.g., nick; methylate; etc.) target nucleic acid (DNA or RNA; single stranded or double stranded); (ii) modulate transcription of a target nucleic acid; (iii) bind a target nucleic acid (e.g., for purposes of isolation, labeling, imaging, tracking, etc.); (iv) modify a polypeptide (e.g., a histone) associated with a target nucleic acid; and the like. Because a method that uses a variant Cas9 protein includes binding of the variant Cas9 protein to a particular region in a target nucleic acid (by virtue of being targeted there by an associated Cas9 guide RNA), the methods are generally referred to herein as methods of binding (e.g., a method of binding a target nucleic acid). However, it is to be understood that in some cases, while a method of binding may result in nothing more than binding of the target nucleic acid, in other cases, the method can have different final results (e.g., the method can result in modification of the target nucleic acid, e.g., cleavage/methylation/etc., modulation of transcription from the target nucleic acid, modulation of translation of the target nucleic acid, genome editing, modulation of a protein associated with the target nucleic acid, isolation of the target nucleic acid, etc.). For examples of suitable methods, Cas9 variants, guide RNAs, etc., see, for example, Jinek et al., Science. 2012 Aug. 17; 337(6096):816-21; Chylinski et al., RNA Biol. 2013 May; 10(5):726-37; Ma et al., Biomed Res Int. 2013; 2013:270805; Hou et al., Proc Natl Acad Sci USA. 2013 Sep. 24; 110(39):15644-9; Jinek et al., Elife. 2013; 2:e00471; Pattanayak et al., Nat Biotechnol. 2013 September; 31(9):839-43; Qi et al, Cell. 2013 Feb. 28; 152(5):1173-83; Wang et al., Cell. 2013 May 9; 153(4):910-8; Auer et. al., Genome Res. 2013 Oct. 31; Chen et. al., Nucleic Acids Res. 2013 Nov. 1; 41(20):e19; Cheng et. al., Cell Res. 2013 October; 23(10):1163-71; Cho et. al., Genetics. 2013 November; 195(3):1177-80; DiCarlo et al., Nucleic Acids Res. 2013 April; 41(7):4336-43; Dickinson et. al., Nat Methods. 2013 October; 10(10):1028-34; Ebina et. al., Sci Rep. 2013; 3:2510; Fujii et. al, Nucleic Acids Res. 2013 Nov. 1; 41(20):e187; Hu et. al., Cell Res. 2013 November; 23(11):1322-5; Jiang et. al., Nucleic Acids Res. 2013 Nov. 1; 41(20):e188; Larson et. al., Nat Protoc. 2013 November; 8(11):2180-96; Mali et. al., Nat Methods. 2013 October; 10(10):957-63; Nakayama et. al., Genesis. 2013 December; 51(12):835-43; Ran et. al., Nat Protoc. 2013 November; 8(11):2281-308; Ran et. al., Cell. 2013 Sep. 12; 154(6):1380-9; Upadhyay et. al., G3 (Bethesda). 2013 Dec. 9; 3(12):2233-8; Walsh et. al., Proc Natl Acad Sci USA. 2013 Sep. 24; 110(39):15514-5; Xie et. al., Mol Plant. 2013 Oct. 9; Yang et. al., Cell. 2013 Sep. 12; 154(6):1370-9; and U.S. patents and patent applications: U.S. Pat. Nos. 8,906,616; 8,895,308; 8,889,418; 8,889,356; 8,871,445; 8,865,406; 8,795,965; 8,771,945; 8,697,359; 20140068797; 20140170753; 20140179006; 20140179770; 20140186843; 20140186919; 20140186958; 20140189896; 20140227787; 20140234972; 20140242664; 20140242699; 20140242700; 20140242702; 20140248702; 20140256046; 20140273037; 20140273226; 20140273230; 20140273231; 20140273232; 20140273233; 20140273234; 20140273235; 20140287938; 20140295556; 20140295557; 20140298547; 20140304853; 20140309487; 20140310828; 20140310830; 20140315985; 20140335063; 20140335620; 20140342456; 20140342457; 20140342458; 20140349400; 20140349405; 20140356867; 20140356956; 20140356958; 20140356959; 20140357523; 20140357530; 20140364333; and 20140377868; all of which are hereby incorporated by reference in their entirety.

[0643] For example, the present disclosure provides (but is not limited to) methods of cleaving a target nucleic acid; methods of editing a target nucleic acid; methods of modulating transcription from a target nucleic acid; methods of isolating a target nucleic acid, methods of binding a target nucleic acid, methods of imaging a target nucleic acid, methods of modifying a target nucleic acid, and the like. For example, in some cases, a subject variant Cas9 protein is a nickase and can be used to modify a target nucleic acid (e.g., a target DNA, e.g., genomic DNA) by nicking the nucleic acid. In some such cases, a donor polynucleotide is provided such that the donor sequence of the donor polynucleotide is incorporated into the target nucleic acid.

[0644] In some cases, a method includes a paired nickase strategy in which a subject variant Cas9 protein is a nickase and is used (e.g., in combination with Cas9 guide RNAs that are offset and target opposite strands of a double stranded target nucleic acid) to generate a double stranded break (DSB) in the target nucleic acid, and therefore to generate a modified target nucleic acid with increased specificity (e.g., relative to a wild type Cas9 protein—because off-target nicks can be efficiently repaired by the cell while on-target nicks are double strand brakes that lead to non-homologous end-joining or homology directed repair).

[0645] As used herein, the terms/phrases “contact a target nucleic acid” and “contacting a target nucleic acid”, for example, with a variant Cas9 protein, with a subject system, etc. encompass all methods for contacting the target nucleic acid. For example, a variant Cas9 protein can be provided as protein, RNA (encoding the variant Cas9 protein), or DNA (encoding the variant Cas9 protein); while a Cas9 guide RNA can be provided as a guide RNA or as a nucleic acid encoding the guide RNA. As such, when, for example, performing a method in a cell (e.g., inside of a cell in vitro, inside of a cell in vivo, inside of a cell ex vivo), a method that includes contacting the target nucleic acid encompasses the introduction into the cell of any or all of the components in their active/final state (e.g., in the form of a protein(s) for a variant Cas9 protein, in the form of an RNA for the guide RNA), and also encompasses the introduction into the cell of one or more nucleic acids encoding one or more of the components (e.g., nucleic acid(s) having nucleotide sequence(s) encoding a variant Cas9 protein(s), nucleic acid(s) having nucleotide sequence(s) encoding Cas9 guide RNA(s), and the like). Because the methods can also be performed in vitro outside of a cell, a method that includes contacting a target nucleic acid, (unless otherwise specified) encompasses contacting outside of a cell in vitro, inside of a cell in vitro, inside of a cell in vivo, and inside of a cell ex vivo.

[0646] In some cases, a subject method is a method that includes contacting a target nucleic acid with a subject variant Cas9 protein. In some cases, a subject method includes contacting a target nucleic acid with a variant Cas9 protein and a Cas9 guide RNA (e.g., in some cases a truncated Cas9 guide RNA, e.g., not having stem loops 2 or 3). In some cases, a subject method includes contacting a target nucleic acid with a variant Cas9 protein and a Cas9 guide RNA (e.g., a truncated guide RNA, e.g., not having stem loops 2 or 3) and a dimerizer (e.g., light, a dimerizing agent, etc.), e.g., in cases where the variant Cas9 is a split Cas9. In some cases, a method is a method of contacting a target nucleic acid with a system. In some cases, the system can include: (i) a subject variant Cas9 protein and a Cas9 guide RNA; (ii) a subject variant Cas9 protein and a Cas9 guide RNA and a dimerizer; or (iii) a subject variant Cas9 protein and a Cas9 guide RNA and at least one of: a dimerizer and a donor polynucleotide.

[0647] In some cases, a subject method is a method of detecting a conformational change in a reporter Cas9 protein. Such methods can include: (a) contacting a subject reporter Cas9 protein with a Cas9 guide RNA (e.g., if the reporter Cas9 protein is one that detects a conformational change upon Cas9 guide RNA binding), or with a Cas9 guide RNA and a target nucleic acid (e.g., if the reporter Cas9 protein is one that detects a conformational change upon on-target binding of a Cas9 complex to a target nucleic acid); and (b) measuring the detectable signal prior to and after said contacting (e.g., to determine if the amount of signal changed upon said contacting, and to therefore determine if the reporter Cas9 protein changed confirmation upon said contacting). In some cases the method also includes (i) determining that the amount of detectable signal changed upon said contacting, and determining that the reporter Cas9 protein changed conformation upon said contacting; or (ii) determining that the amount of detectable signal did not change upon said contacting, and determining that the reporter Cas9 protein did not change conformation upon said contacting.

[0648] In some cases, a subject method is a method of detecting the binding of a reporter Cas9 protein to a Cas9 guide RNA and the method includes: (a) contacting a subject reporter Cas9 protein (e.g., one that has been labeled to detect a conformational change resulting from binding of the reporter Cas9 protein to a Cas9 guide RNA) with a guide RNA; and (b) measuring the detectable signal prior to and after said contacting. In some cases the method also includes (i) determining that the amount of detectable signal changed upon said contacting, and determining that the reporter Cas9 protein bound to the guide RNA; or (ii) determining that the amount of detectable signal did not change upon said contacting, and determining that the reporter Cas9 protein did not bind to the guide RNA.

[0649] In some cases, a subject method is a method of detecting on-target binding of a Cas9 complex to a target nucleic acid, wherein the Cas9 complex comprises a Cas9 guide RNA and a subject reporter Cas9 protein, and the method includes: (a) contacting the Cas9 complex with a guide RNA and a target nucleic acid (e.g., where the reporter Cas9 protein has been labeled to detect a conformational change resulting from on-target binding of the Cas9 complex to a target nucleic acid molecule); and (b) measuring the detectable signal prior to and after said contacting. In some cases the method also includes (i) determining that the amount of detectable signal changed upon said contacting, and determining that the Cas9 complex bound on-target to the target nucleic acid; or (ii) determining that the amount of detectable signal did not change upon said contacting, and determining that the Cas9 complex did not bind on-target to the target nucleic acid.

### Labeling a Reporter Cas9 Protein

[0650] A reporter Cas9 protein can be generated from a naturally existing Cas9 protein and can also be generated from a subject variant Cas9 protein (e.g., by attaching a signal pair to the cysteines of a variant Cas9 protein having two non-naturally existing cysteine residues). Thus, also provided in the present disclosure are methods of labeling a Cas9 protein (e.g. a variant Cas9 protein that includes a pair of non-naturally existing cysteine residues) to generate a reporter Cas9 protein. Such methods include attaching/conjugating a signal pair to the variant Cas9 protein.

[0651] A signal partner (e.g., a signal moiety and/or a quencher moiety of a signal quenching pair; a FRET donor moiety and/or a FRET acceptor moiety of a FRET pair; and the like) can be attached to a Cas9 protein in any convenient way. For example, a signal partner can be attached/conjugated to amino acids at appropriate positions in the Cas9 protein (e.g., positions such that the conformational change of interest will elicit the desired change in detectable signal, e.g, at suitable residues of a residue pair, at the cysteines of a cysteine pair, etc.). For example, a signal partner can be conjugated to a cysteine residue using any convenient method. For example, a signal partner can be provided as a maleimide which can react with thiols (e.g., present on cysteine residues), a process which is widely used for bioconjugation and labeling of biomolecules including proteins and peptides.

[0652] Thus, the present disclosure provides methods of labeling a Cas9 protein (e.g., a variant Cas9 protein that includes two non-naturally occurring cysteine residues) to generate a reporter Cas9 protein. In some cases, such a method includes: attaching a first and a second signal partner of a signal pair to the first and second cysteines of a subject variant Cas9 protein (e.g., a variant Cas9 protein that includes two non-naturally occurring cysteine residues) In some cases, the first signal partner is a signal moiety that produces a detectable signal and the second signal partner is a quencher moiety that quenches the detectable signal (a signal quenching pair). In some cases, the first signal partner is a fluorescence resonance energy transfer (FRET) donor moiety and the second signal partner is a FRET acceptor moiety that produces the detectable signal (FRET pair). In some cases, the first and second signal partners are attached to the variant Cas9 protein simultaneously. In some cases, one signal partner of the signal pair is attached to the variant Cas9 protein before the other signal partner of the signal pair is attached.

[0653] In some cases, the first and second signal partners are attached one at a time. In some cases, the first and second signal partners are attached simulataneously to a Cas9 protein (e.g., a variant Cas9 protein). For example, a Cas9 protein (e.g., a variant Cas9 protein) can be contacted with both signal partners at the same time. In some cases (e.g., where the variant Cas9 protein has two non-naturally occurring cysteines), simultaneous attachment can generate a population of labeled Cas9 proteins in which approximately 25% of the population includes one signal partner at both cysteine positions, 25% of the population includes the other signal partner at both cysteine positions, and 50% of the population includes one signal partner at one cysteine and the other signal partner at the other cysteine. Thus, when the signal pair is a FRET pair, 50% of the population would include the desired reporter Cas9 protein. Such a heterologous population can be used for any desired method because even when only 50% of the population is used, the change in signal upon conformational change is great enough to be detected. For example, FIG. 6A-6B, FIG. 7A-7B, and FIG. 8A-8B were all generated using such a population.

[0654] However, in some cases, it is desirable to enrich the population for those reporter Cas9 proteins that include one signal partner at one cysteine and the other signal partner at the other cysteine. In other words, the labeling can be performed such that the number of properly labeled proteins is increased relative to a standard simultaneous labeling procedure. For example, in some cases, a method is used that enriches for those molecules that include the first signal partner at one location, and the second signal partner at another location. Such an enriched population can be generated using a procedure such as the example method schematized in FIG. 5. Thus, also provided in the present disclosure are methods of generating a reporter Cas9 from a variant Cas9 protein (e.g., labeling a variant Cas9 protein to generate a reporter Cas9 protein, labeling a population of variant Cas9 proteins to generate a population of reporter Cas9 proteins etc.). In some cases, such methods include (a) attaching one of: a FRET donor moiety and a FRET acceptor moiety of a FRET pair, to a population of variant Cas9 proteins, to generate a population of label-contacted variant Cas9 proteins; (b) contacting the population of label-contacted variant Cas9 proteins with an activated thiol that is attached to a solid support (e.g., a resin, a bead such as a magnetic bead, etc.) to generate a population of supported label-contacted variant Cas9 proteins; (c) isolating the solid support to remove variant Cas9 proteins that are not attached to the solid support; (d) removing the solid support by contacting the population of supported label-contacted variant Cas9 proteins with a reducing agent (e.g., dithiothreitol (DTT)) to generate an enriched population of label-contacted variant Cas9 proteins; and (e) attaching the other of the FRET donor moiety and the FRET acceptor moiety of the FRET pair to the enriched population of label-contacted variant Cas9 proteins to generate a population of variant Cas9 proteins enriched for reporter Cas9 proteins. In some cases, a repeat of step (a) can be performed after step (c) and prior to step (d).

[0655] In some cases, multiple different reporter Cas9 proteins can be used simultaneously. For example, a first reporter Cas9 protein (having a reporter pair that produces a first detectable signal) can be complexed with a first guide RNA that targets a particular sequence, and a second reporter Cas9 protein (having a reporter pair that produces a second detectable signal that is distinguishable from the first detectable signal) can be complexed with a second guide RNA that targets a different particular sequence. Thus, on-target binding events at different positions within a target nucleic acid (or, for example, binding to different target nucleic acids, e.g., different chromosomes within a cell) can be simultaneously and distinguishably detected.

### Target Nucleic Acids and Target Cells of Interest

[0656] A target nucleic acid can be any nucleic acid (e.g., DNA, RNA), can be double strand or single stranded, can be any type of nucleic acid (e.g., a chromosome, derived from a chromosome, chromosomal, plasmid, viral, extracellular, intracellular, mitochondrial, chloroplast, linear, circular, etc.) and can be from any organism (e.g., as long as the Cas9 guide RNA can hybridize to a target sequence in a target nucleic acid, that target nucleic acid can be targeted). As noted above, in some cases, the target nucleic acid includes a PAM sequence.

[0657] A target nucleic acid can be DNA or RNA. A target nucleic acid can be double stranded (e.g., dsDNA, dsRNA) or single stranded (e.g., ssRNA, ssDNA). In some cases, a target nucleic acid is single stranded. In some cases, a target nucleic acid is a single stranded RNA (ssRNA). In some cases, a target ssRNA (e.g., a target cell ssRNA, a viral ssRNA, etc.) is selected from: mRNA, rRNA, tRNA, non-coding RNA (ncRNA), long non-coding RNA (lncRNA), and microRNA (miRNA). In some cases, a target nucleic acid is a single stranded DNA (ssDNA) (e.g., a viral DNA). As noted above, in some cases, a target nucleic acid is single stranded. In some such cases, methods in which the target nucleic acid is single stranded, the method can include the use of a PAMmer (e.g., so that a PAM sequence is present at the target).

[0658] A target nucleic acid can be located anywhere, for example, outside of a cell in vitro, inside of a cell in vitro, inside of a cell in vivo, inside of a cell ex vivo. Suitable target cells (which can comprise target nucleic acids) include, but are not limited to: a bacterial cell; an archaeal cell; a cell of a single-cell eukaryotic organism; a plant cell; an algal cell, e.g., Botryococcus braunii, Chlamydomonas reinhardtii, Nannochloropsis gaditana, Chlorella pyrenoidosa, Sargassum patens, C. agardh, and the like; a fungal cell (e.g., a yeast cell); an animal cell; a cell from an invertebrate animal (e.g. fruit fly, cnidarian, echinoderm, nematode, etc.); a cell from a vertebrate animal (e.g., fish, amphibian, reptile, bird, mammal); a cell from a mammal (e.g., a cell from a rodent, a cell from a human, etc.); and the like. Any type of cell may be of interest (e.g. a stem cell, e.g. an embryonic stem (ES) cell, an induced pluripotent stem (iPS) cell, a germ cell (e.g., an oocyte, a sperm, an oogonia, a spermatogonia, etc.), a somatic cell, e.g. a fibroblast, a hematopoietic cell, a neuron, a muscle cell, a bone cell, a hepatocyte, a pancreatic cell; an in vitro or in vivo embryonic cell of an embryo at any stage, e.g., a 1-cell, 2-cell, 4-cell, 8-cell, etc. stage zebrafish embryo; etc.). Cells may be from established cell lines or they may be primary cells, where “primary cells”, “primary cell lines”, and “primary cultures” are used interchangeably herein to refer to cells and cells cultures that have been derived from a subject and allowed to grow in vitro for a limited number of passages, i.e. splittings, of the culture. For example, primary cultures are cultures that may have been passaged 0 times, 1 time, 2 times, 4 times, 5 times, 10 times, or 15 times, but not enough times go through the crisis stage. Typically, the primary cell lines are maintained for fewer than 10 passages in vitro. Target cells can be unicellular organisms and/or can be grown in culture. If the cells are primary cells, they may be harvest from an individual by any convenient method. For example, leukocytes may be conveniently harvested by apheresis, leukocytapheresis, density gradient separation, etc., while cells from tissues such as skin, muscle, bone marrow, spleen, liver, pancreas, lung, intestine, stomach, etc. can be conveniently harvested by biopsy.

[0659] In some of the above applications, the subject methods may be employed to induce target nucleic acid cleavage, target nucleic acid modification, and/or to bind target nucleic acids (e.g., for visualization, for collecting and/or analyzing, etc.) in mitotic or post-mitotic cells in vivo and/or ex vivo and/or in vitro (e.g., to disrupt production of a protein encoded by a targeted mRNA). Because the guide RNA provides specificity by hybridizing to target nucleic acid, a mitotic and/or post-mitotic cell of interest in the disclosed methods may include a cell from any organism (e.g. a bacterial cell, an archaeal cell, a cell of a single-cell eukaryotic organism, a plant cell, an algal cell, e.g., Botryococcus braunii, Chlamydomonas reinhardtii, Nannochloropsis gaditana, Chlorella pyrenoidosa, Sargassum patens, C. agardh, and the like, a fungal cell (e.g., a yeast cell), an animal cell, a cell from an invertebrate animal (e.g. fruit fly, cnidarian, echinoderm, nematode, etc.), a cell from a vertebrate animal (e.g., fish, amphibian, reptile, bird, mammal), a cell from a mammal, a cell from a rodent, a cell from a human, etc.).

[0660] Introducing Components into a Target Cell

[0661] A Cas9 guide RNA (or a nucleic acid comprising a nucleotide sequence encoding same), a PAMmer (or a nucleic acid comprising a nucleotide sequence encoding same), a Cas9 protein (e.g., a subject variant Cas9 protein) (or a nucleic acid (e.g., mRNA or DNA) comprising a nucleotide sequence encoding the Cas9 protein), and/or a donor polynucleotide can be introduced into a host cell by any of a variety of well-known methods.

[0662] Methods of introducing nucleic acids and/or proteins into a host cell are known in the art, and any known method can be used to introduce a nucleic acid (e.g., an expression construct) and/or a protein into a stem cell or progenitor cell. Suitable methods include, e.g., viral or bacteriophage infection, transfection, conjugation, protoplast fusion, lipofection, nucleofection, electroporation, calcium phosphate precipitation, polyethyleneimine (PEI)-mediated transfection, DEAE-dextran mediated transfection, liposome-mediated transfection, particle gun technology, calcium phosphate precipitation, direct micro injection, nanoparticle-mediated nucleic acid delivery (see, e.g., Panyam et., al Adv Drug Deliv Rev. 2012 Sep. 13. pii: 50169-409X(12)00283-9. doi: 10.1016/j.addr.2012.09.023), and the like. Any or all of the components can be introduced into a cell as a composition (e.g., including any convenient combination of: a Cas9 protein, e.g., a subject variant Cas9 protein; a nucleic acid encoding a subject variant Cas9 protein; a Cas9 guide RNA; a PAMmer; a donor polynucleotide; etc.) using known methods, e.g., such as nucleofection, transfection, injection, and the like.

### Cell Synchronization

[0663] In some embodiments, a subject method includes a step of blocking a cell at a desired phase in the cell cycle (e.g., blocking a cell at S phase, blocking a cell at M phase, etc.), which can increase efficiency of Cas9 mediated methods (e.g., methods that include cleavage). In some cases, a subject method includes a step of contacting a target cell with a cell cycle blocking agent that blocks the target cell at a desired phase in the cell cycle. In some embodiments, a subject method includes a step of enriching a cell population for cells that are in a desired phase(s) of the cell cycle.

[0664] Thus, in some embodiments, subject methods include (i) the step of enriching a cell population for cells that are in a desired phase(s) of the cell cycle, and/or (ii) the step of blocking a cell at a desired phase in the cell cycle. The cell cycle is the series of events that take place in a cell leading to its division and duplication (replication) that produces two daughter cells. Two major phases of the cell cycle are the S phase (DNA synthesis phase), in which DNA duplication occurs, and the M phase (mitosis), in which the chromosomes segregation and cell division occurs. The eukaryotic cell cycle is traditionally divided into four sequential phases: G1, S, G2, and M. G1, S, and G2 together can collectively be referred to as “interphase”. Under certain conditions, cells can delay progress through G1 and can enter a specialized resting state known as G0 (G zero), in which they can remain for days, weeks, or even years before resuming proliferation. The period of transition from one state to another can be referred to using a hyphen, for example, G1/S, G2/M, etc. As is known in the art, various checkpoints exist throughout the cell cycle at which a cell can monitor conditions to determine whether cell cycle progression should occur. For example, the G2/M DNA damage checkpoint serves to prevent cells from entering mitosis (M-phase) with genomic DNA damage.

[0665] A step of enriching a population of eukaryotic cells for cells in a desired phase of the cell cycle (e.g., G1, S, G2, M, G1/S, G2/M, G0, etc., or any combination thereof), and can be performed using any convenient method (e.g., a cell separation method and/or a cell synchronization method).

[0666] In some cases, a subject method includes a step of enriching a population of eukaryotic cells for cells in the G0 phase of the cell cycle. For example, in some cases, a subject method includes: (a) enriching a population of eukaryotic cells for cells in the G0 phase of the cell cycle; and (b) contacting the target nucleic acid (e.g., target DNA) with a Cas9 protein (e.g., a subject variant Cas9 protein), a Cas9 guide RNA, and a dimerizing agent.

[0667] In some cases, a subject method includes a step of enriching a population of eukaryotic cells for cells in the G1 phase of the cell cycle. For example, in some cases, a subject method includes: (a) enriching a population of eukaryotic cells for cells in the G1 phase of the cell cycle; and (b) contacting the target nucleic acid (e.g., target DNA) with a Cas9 protein (e.g., a subject variant Cas9 protein), a Cas9 guide RNA, and a dimerizing agent.

[0668] In some cases, a subject method includes a step of enriching a population of eukaryotic cells for cells in the G2 phase of the cell cycle. For example, in some cases, a subject method includes: (a) enriching a population of eukaryotic cells for cells in the G2 phase of the cell cycle; and (b) contacting the target nucleic acid (e.g., target DNA) with a Cas9 protein (e.g., a subject variant Cas9 protein), a Cas9 guide RNA, and a dimerizing agent.

[0669] In some cases, a subject method includes a step of enriching a population of eukaryotic cells for cells in the S phase of the cell cycle. For example, in some cases, a subject method includes: (a) enriching a population of eukaryotic cells for cells in the S phase of the cell cycle; and (b) contacting the target nucleic acid (e.g., target DNA) with a Cas9 protein (e.g., a subject variant Cas9 protein), a Cas9 guide RNA, and a dimerizing agent.

[0670] In some cases, a subject method includes a step of enriching a population of eukaryotic cells for cells in the M phase of the cell cycle. For example, in some cases, a subject method includes: (a) enriching a population of eukaryotic cells for cells in the M phase of the cell cycle; and (b) contacting the target nucleic acid (e.g., target DNA) with a Cas9 protein (e.g., a subject variant Cas9 protein), a Cas9 guide RNA, and a dimerizing agent.

[0671] In some cases, a subject method includes a step of enriching a population of eukaryotic cells for cells in the G1/S transition of the cell cycle. For example, in some cases, a subject method includes: (a) enriching a population of eukaryotic cells for cells in the G1/S transition of the cell cycle; and (b) contacting the target nucleic acid (e.g., target DNA) with a Cas9 targeting complex (e.g., via introducing into the target eukaryotic cell(s) at least one component of a Cas9 targeting complex)(e.g., contacting the target nucleic acid (e.g., target DNA) with a Cas9 protein (e.g., a subject variant Cas9 protein), a Cas9 guide RNA, and a dimerizing agent.

[0672] In some cases, a subject method includes a step of enriching a population of eukaryotic cells for cells in the G2/M transition of the cell cycle. For example, in some cases, a subject method includes: (a) enriching a population of eukaryotic cells for cells in the G2/M transition of the cell cycle; and (b) contacting the target nucleic acid (e.g., target DNA) with a Cas9 targeting complex (e.g., via introducing into the target eukaryotic cell(s) at least one component of a Cas9 targeting complex)(e.g., contacting the target nucleic acid (e.g., target DNA) with a Cas9 protein (e.g., a subject variant Cas9 protein), a Cas9 guide RNA, and a dimerizing agent.

[0673] By “enrich” is meant increasing the fraction of desired cells in the resulting cell population. For example, in some cases, enriching includes selecting desirable cells (e.g., cells that are in the desired phase of the cell cycle) away from undesirable cells (e.g., cells that are not in the desired phase of the cell cycle), which can result in a smaller population of cells, but a greater fraction (i.e., higher percentage) of the cells of the resulting cell population will be desirable cells (e.g., cells that are in the desired phase of the cell cycle). Cell separation methods (described below) can be an example of this type of enrichment. In other cases, enriching includes converting undesirable cells (e.g., cells that are not in the desired phase of the cell cycle) into desirable cells (e.g., cells that are in the desired phase of the cell cycle), which can result in a similar size population of cells as the starting population, but a greater fraction of those cells will be desirable cells (e.g., cells that are in the desired phase of the cell cycle). Cell synchronization methods (described below) can be an example of this type of enrichment. In some cases, enrichment can both change the overall size of the resulting cell population (compared to the size of the starting population) and increase the fraction of desirable cells. For example, multiple methods/techniques can be combined (e.g., to improve enrichment, to enrich for cells a more than one desired phase of the cell cycle, etc.).

[0674] In some cases, enriching includes a cell separation method. Any convenient cell separation method can be used to enrich for cells that are at various phases of the cell cycle. Suitable cell separation techniques for enrichment of cells at particular phases of the cell cycle include, but are not limited to: (i) mitotic shake-off (M-phase; mechanical separation on the basis of cell adhesion properties, e.g., adherent cells in the mitotic phase detach from the surface upon gentle shaking, tapping, or rinsing); (ii) Countercurrent centrifugal elutriation (CCE) (G1, S, G2/M, and intermediate states; physical separation on the basis of cell size and density); and (iii) flow cytometry and cell sorting (e.g., G0, G1, S, G2/M; physical separation based on specific intracellular, e.g., DNA, content) and cell surface and/or size properties).

[0675] Mitotic shake-off generally includes dislodgment of low adhesive, mitotic cells by agitation (see for example, Beyrouthy et. al., PLoS ONE 3, e3943 (2008); Schorl, C. & Sedivy, Methods 41, 143-150 (2007)). CCE generally includes the separation of cells according to their sedimentation velocity in a gravitational field where the liquid containing the cells is made to flow against the centrifugal force with the sedimentation rate of cells being proportional to their size (see for example, Grosse et. al., Prep Biochem Biotechnol. 2012; 42(3):217-33; Banfalvi et. al., Nat. Protoc. 3, 663-673 (2008)). Flow cytometry methods generally include the characterization of cells according to antibody and/or ligand and/or dye-mediated fluorescence and scattered light in a hydrodynamically focused stream of liquid with subsequent electrostatic, mechanical or fluidic switching sorting (see for example, Coquelle et. al., Biochem. Pharmacol. 72, 1396-1404 (2006); Juan et. al., Cytometry 49, 170-175 (2002)). For more information related to cell separation techniques, refer to, for example, Rosner et al., Nat Protoc. 2013 March; 8(3):602-26.

[0676] In some cases, enriching includes a cell synchronization method (i.e., synchronizing the cells of a cell population). Cell synchronization is a process by which cells at different stages of the cell cycle within a cell population (i.e., a population of cells in which various individual cells are in different phases of the cycle) are brought into the same phase. Any convenient cell synchronization method can be used in the subject methods to enrich for cells that are at a desired phase(s) of the cell cycle. For example, cell synchronization can be achieved by blocking cells at a desired phase in the cell cycle, which allows the other cells to cycle until they reach the blocked phase. For example, suitable methods of cell synchronization include, but are not limited to: (i) inhibition of DNA replication, DNA synthesis, and/or mitotic spindle formation (e.g., sometimes referred to herein as contacting a cell with a cell cycle blocking composition); (ii) mitogen or growth factor withdrawal (G0, G1, G0/G1; growth restriction-induced quiescence via, e.g., serum starvation and/or amino acid starvation); and (iii) density arrest (G1; cell-cell contact-induced activation of specific transcriptional programs) (see for example, Rosner et al., Nat Protoc. 2013 March; 8(3):602-26 (e.g., see Table 1 of Rosner et al.), which is hereby incorporated by reference in its entirety, and see references cited therein).

[0677] Various methods for cell synchronization will be known to one of ordinary skill in the art and any convenient method can be used. For additional methods for cell synchronization (e.g., synchronization of plant cells), see, for example, Sharma, Methods in Cell Science, 1999, Volume 21, Issue 2-3, pp 73-78 (“Synchronization in plant cells—an introduction”); Dolezel et al., Methods in Cell Science, 1999, Volume 21, Issue 2-3, pp 95-107 (“Cell cycle synchronization in plant root meristems”); Kumagai-Sano et al., Nat Protoc. 2006; 1(6):2621-7; and Cools et al., The Plant Journal (2010) 64, 705-714; and Rosner et al., Nat Protoc. 2013 March; 8(3):602-26; all of which are hereby incorporated by reference in their entirety.

### Cell Cycle Blocking Compositions

[0678] In some embodiments, a cell (or cells of a cell population), is blocked at a desired phase of the cell cycle (e.g., by contacting the cell with a cycle blocking composition). In some embodiments, cells of a cell population are synchronized (e.g., by contacting the cells with a cell cycle blocking composition). A cell cycle blocking composition can include one or more cell cycle blocking agents. The term “cell cycle blocking agent” is used herein to refer to an agent that blocks (e.g., reversibly blocks (pauses), irreversibly blocks) a cell at a particular point in the cell cycle such that the cell cannot proceed further. Suitable cell cycle blocking agents include reversible cell cycle blocking agents. Reversible cell cycle blocking agents do not render the cell permanently blocked. In other words, when reversible cell cycle blocking agent is removed from the cell medium, the cell is free to proceed through the cell cycle. Cell cycle blocking agents are sometimes referred to in the art as cell synchronization agents because when such agents contact a cell population (e.g., a population having cells that are at different stages of the cell cycle), the cells of the population become blocked at the same phase of the cell cycle, thus synchronizing the population of cells relative to that particular phase of the cell cycle. When the cell cycle blocking agent used is reversible, the cells can then be “released” from cell cycle block.

[0679] Suitable cell cycle blocking agents include, but are not limited to: nocodazole (G2, M, G2/M; inhibition of microtubule polymerization), colchicine (G2, M, G2/M; inhibition of microtubule polymerization); demecolcine (colcemid) (G2, M, G2/M; inhibition of microtubule polymerization); hydroxyurea (G1, S, G1/S; inhibition of ribonucleotide reductase); aphidicolin (G1, S, G1/S; inhibition of DNA polymerase-α and DNA polymerase-δ); lovastatin (G1; inhibition of HMG-CoA reductase/cholesterol synthesis and the proteasome); mimosine (G1, S, G1/S; inhibition of thymidine, nucleotide biosynthesis, inhibition of Ctf4/chromatin binding); thymidine (G1, S, G1/S; excess thymidine-induced feedback inhibition of DNA replication); latrunculin A (M; delays anaphase onset, actin polymerization inhibitor, disrupts interpolar microtubule stability); and latrunculin B (M; actin polymerization inhibitor).

[0680] Suitable cell cycle blocking agents can include any agent that has the same or similar function as the agents above (e.g., an agent that inhibits microtubule polymerization, an agent that inhibits ribonucleotide reductase, an agent that inhibits DNA polymerase-α and/or DNA polymerase-δ, an agent that inhibits HMG-CoA reductase and/or cholesterol synthesis, an agent that inhibits nucleotide biosynthesis, an agent that inhibits DNA replication, i.e., inhibit DNA synthesis, an agent that inhibits initiation of DNA replication, an agent that inhibits deoxycytosine synthesis, an agent that induces excess thymidine-induced feedback inhibition of DNA replication, and agent that disrupts interpolar microtubule stability, an agent that inhibits actin polymerization, and the like). Suitable agents that block G1 can include: staurosporine, dimethyl sulfoxide (DMSO), glycocorticosteroids, and/or mevalonate synthesis inhibitors. Suitable agents that block G2 phase can include CDK1 inhibitors e.g., RO-3306. Suitable agents that block M can include cytochalasin D.

[0681] In some cases, suitable cell cycle blocking agents include: cobtorin; dinitroaniline; benefin (benluralin); butralin; dinitramine; ethalfluralin; oryzalin; pendimethalin; trifluralin; amiprophos-methyl; butamiphos dithiopyr; thiazopyr propyzamider-pronamide-tebutam DCPA (chlorthal-dimethyl); anisomycin; alpha amanitin; jasmonic acid; abscisic acid; menadione; cryptogeine; hydrogen peroxide; sodium permanganate; indomethacin; epoxomycin; lactacystein; icrf 193; olomoucine; roscovitine; bohemine; K252a; okadaic acid; endothal; caffeine; MG132; cycline dependent kinase inhibitors; and the like.

[0682] For more information regarding cell cycle blocking agents, see Merrill G F, Methods Cell Biol. 1998; 57:229-49, which is hereby incorporated by reference in its entirety.

### Systems and Kits

[0683] The present disclosure provides a system and/or kit comprising a variant Cas9 protein of the present disclosure (e.g., a variant Cas9 protein having two non-naturally occurring cysteines, e.g., a cysteine pair as described above), or a nucleic acid encoding a subject variant Cas9 protein. In some cases, a system and/or kit also includes a reagents for labeling such a variant Cas9 protein (e.g., to generate a reporter Cas9 protein). For example, in some cases, a system and/or kit includes one or more of: (i) a signal moiety, (ii) a quencher moiety, (iii) a signal moiety and a quencher moiety that form a signal quenching pair, (iv) a fluorescence resonance energy transfer (FRET) donor moiety, (v) a FRET acceptor moiety, and (vi) a FRET donor moiety and a FRET acceptor moiety that form a FRET pair.

[0684] In some cases, a system and/or kit includes a reagent for reconstitution and/or dilution of the Cas9 protein (e.g., a subject variant Cas9 protein and/or a subject reporter Cas9 protein) or the nucleic acid. In some cases, a system and/or kit includes: (a) a variant Cas9 protein of the present disclosure, or a nucleic acid encoding a subject variant Cas9 protein; and (b) a Cas9 guide RNA, or a nucleic acid encoding a Cas9 guide RNA. In some cases (e.g., when the subject variant Cas9 is also a split Cas9) the Cas9 guide RNA can be a truncated guide RNA, and the system and/or kit can include a dimerization agent (e.g., a small molecule dimerizer that induces dimerization of the first fusion polypeptide and the second fusion polypeptide of the split Cas9 protein). Small molecule dimerizers (also referred to herein as “small molecule dimerizing agents”) are described elsewhere herein. In some cases, a system and/or kit of the present disclosure includes a PAMmer (described in more detail below). In some cases, a system and/or kit of the present disclosure comprises a donor polynucleotide (described in more detail below).

[0685] Components of a subject kit can be in present in the same or separate containers. For example, in some cases, the components can be combined in a single container. Any of the kits described herein can further include one or more additional reagents, where such additional reagents can be selected from: a dilution buffer; a reconstitution solution; a wash buffer; a control reagent; a control expression vector or RNA or DNA polynucleotide; a reagent for in vitro production of a subject variant Cas9 protein from DNA or RNA, and the like.

[0686] In addition to above-mentioned components, a subject kit can further include instructions for using the components of the kit to practice the subject methods. The instructions for practicing the subject methods are generally recorded on a suitable recording medium. For example, the instructions may be printed on a substrate, such as paper or plastic, etc. As such, the instructions may be present in the kits as a package insert, in the labeling of the container of the kit or components thereof (i.e., associated with the packaging or subpackaging) etc. In other embodiments, the instructions are present as an electronic storage data file present on a suitable computer readable storage medium, e.g. CD-ROM, diskette, flash drive, etc. In yet other embodiments, the actual instructions are not present in the kit, but means for obtaining the instructions from a remote source, e.g. via the internet, are provided. An example of this embodiment is a kit that includes a web address where the instructions can be viewed and/or from which the instructions can be downloaded. As with the instructions, this means for obtaining the instructions is recorded on a suitable substrate.

### EXAMPLES

[0687] The following examples are put forth so as to provide those of ordinary skill in the art with a complete disclosure and description of how to make and use the present invention, and are not intended to limit the scope of what the inventors regard as their invention nor are they intended to represent that the experiments below are all or the only experiments performed. Efforts have been made to ensure accuracy with respect to numbers used (e.g. amounts, temperature, etc.) but some experimental errors and deviations should be accounted for. Unless indicated otherwise, parts are parts by weight, molecular weight is weight average molecular weight, temperature is in degrees Celsius, and pressure is at or near atmospheric. Standard abbreviations may be used, e.g., bp, base pair(s); kb, kilobase(s); pl, picoliter(s); s or sec, second(s); min, minute(s); h or hr, hour(s); aa, amino acid(s); kb, kilobase(s); bp, base pair(s); nt, nucleotide(s); i.m., intramuscular(ly); i.p., intraperitoneal(ly); s.c., subcutaneous(ly); and the like.

### Example 1

[0688] Cas9 is a large, multi-domain protein that undergoes RNA-induced conformational changes to reach a DNA binding-competent state. Crystal structures of apo, sgRNA-bound, and sgRNA/DNA-bound Cas9 from S. pyogenes (FIG. 1A, FIG. 1B) have provided insights into Cas9 function. Described below, a FRET-based approach was developed to investigate structural changes of Cas9 in response to binding various sgRNA and DNA ligands.

### Results

[0689] A FRET construct to monitor lobe closure was produced by introducing donor and acceptor dyes near the hinge region (FIG. 1B). Starting with a cysteine-free variant of Cas9, cysteine residues were introduced at positions D435 and E945 and this variant Cas9 was labeled with both Cy3- and Cy5-maleimide, generating Cas9_{hinge} (a reporter Cas9 protein that can be used to monitor the conformational change associated with Cas9 guide RNA binding). Control labeling reactions with cysteine-free Cas9 indicated that the conjugation chemistry was specific, and doubly-labeled Cas9 was fully functional for DNA cleavage. When the Cy3 dye was excited in sgRNA-bound dCas9_{hinge} at 530 nm, a substantial decrease in energy transfer was observed compared to apo-dCas9_{hinge}, as evidenced by a relative increase in donor (Cy3) fluorescence relative to acceptor (Cy5) fluorescence (FIG. 1C). The observed change scaled with the molar ratio of sgRNA to Cas9, a mixture of donor-only and acceptor-only labeled dCas9_{hinge} showed no evidence of energy transfer, and an sgRNA specific to Neisseria meningitidis Cas9 elicited a negligible change. Thus, the change in fluorescence intensities resulted from an sgRNA-induced, intramolecular conformational change.

[0690] The labeling strategy resulted in a heterogeneous mixture of singly- and doubly-labeled species, further complicating the analysis. The data is therefore reported as (ratio)_{A} as defined by Clegg and colleagues (Majumdar et al., J Mol Biol 351, 1123-1145 (2005); and Clegg et al, Meth Enzymol 211, 353-388 (1992)), whereby acceptor fluorescence via energy transfer is normalized against acceptor fluorescence via direct excitation, without pursuing a more rigorous calculation of exact distances. (ratio)A is directly proportional to FRET efficiency, and changes in (ratio)_{A} across different experimental conditions serve as a proxy for conformational changes.

[0691] Cas9_{hinge} exhibited a (ratio)_{A} decrease of ˜0.32 upon sgRNA binding, with little change occurring upon target DNA binding (FIG. 1C). To identify the sgRNA molecular determinants responsible for driving this large conformational rearrangement, nucleotides (nt) were systematically truncated from either the 5′ or 3′ end of sgRNA. It was found that the 20-nt spacer plays a critical role in controlling the Cas9 conformational state (FIG. 1D). An sgRNA lacking the entire spacer (Δspacer1-20) generated a (ratio)_{A} value indistinguishable from apo-Cas9_{hinge}, despite being >95% bound under the experimental conditions, whereas partially truncated sgRNAs partially restored the change in (ratio)_{A}. Removing one or both hairpins from the 3′ end (Δhairpins1-2) also led to intermediate (ratio)_{A} values (FIG. 1D), and similar data were obtained with dCas9_{hinge}. Thus, motifs at both the 5′ and 3′ ends of the sgRNA are required to stabilize a closed state of Cas9, but in the case of Δhairpins1-2, a fully closed state is not required for rapid cleavage kinetics.

[0692] FIG. 1A-1D show data using a D435C and E945C pair for ‘close to far’ detection (e.g., high-to-low FRET detection) of guide RNA binding to Cas9. These figures illustrate that guide RNA binding to Cas9 can be detected using an amino position (e.g., D435) in the alpha-helical lobe paired with an amino acid position (e.g., E945) in a RuvC domain (e.g., the RuvC-III domain) Full-length sgRNA drives inward lobe closure of Cas9. (FIG. 1A) Domain organization of S. pyogenes Cas9 (top), and X-ray crystal structure of sgRNA/DNA-bound Cas9 (PDB ID code 4UN3), with HNH domain omitted for clarity. BH, bridge helix (“Arg”, “Arg domain”, “Arginine-rich bridge helix”, “Arg-rich domain”, “Arginine-rich region”); PI, PAM-interacting; REC, recognition. (FIG. 1B) Design of Cas9_{hinge} FRET construct; inward lobe closure is exemplified by movement of the bridge helix (arrow). Measured distances between D435 and E945 in apo (PDB ID code 4CMP) and sgRNA/DNA-bound Cas9 structures are indicated. Structures were aligned based on the RuvC and PI domains; regions of the PI domain, sgRNA, and DNA are omitted for clarity. (FIG. 1C) Fluorescence emission spectra of dCas9 in the presence of the indicated substrates. (FIG. 1D) (ratio)_{A} data for Cas9_{hinge} in the presence of the indicated substrates. The inset shows a schematic of full-length sgRNA, colored by motif. Error bars represent the standard deviation from at least three experiments.

[0693] A model was built for the putative activated state using a homologous HNH-dsDNA crystal structure. Two positions (S355 and S867) were selected whose inter-residue distance would change substantially upon target DNA binding according to the model (FIG. 2A). Cas9 labeled with Cy3 and Cy5 at these sites (Cas9_{HNH}) retained wild-type DNA cleavage activity.

[0694] A substantial FRET increase was observed for dCas9_{HNH} upon target DNA binding relative to sgRNA alone (FIG. 2B), and control experiments with non-target DNA or off-target DNA substrates containing PAM or seed mutations failed to generate the same change (FIG. 2B). However, the possibility that the observed change simply reflected the inactive HNH conformation observed crystallographically could not initially be excluded. FRET was next monitored with off-target DNA substrates containing mutations distal from the PAM, which bound Cas9 tightly in competition cleavage assays. Remarkably, the observed (ratio)_{A} values decreased inversely proportional to the number of mismatches (FIG. 2C). Multiple experiments support the argument that these (ratio)_{A} changes cannot be explained by decreasing occupancy of the sgRNA/DNA-bound complex: i) direct binding assays indicate ≥89% of the dCas9_{HNH} population should be bound to all tested DNA substrates; ii) dCas9 forms a stable footprint on these off-target substrates; and iii) increasing the concentration of dsDNA had no discernible effect. The results indicate that the HNH domain samples a conformational equilibrium with on-target DNA that is distinct from partially matching off-target DNA, and suggest that the high FRET state may coincide with an activated HNH conformation at the cleavage site.

[0695] It was possible that altered conformational states of the HNH domain could explain which off-target substrates are cleaved by CRISPR-Cas9. Substrates with ≥4-bp mismatches promoting a low (ratio)_{A} value were either cleaved slowly or not at all (FIG. 2D), indicating that the inability to access the high FRET state associated with an activated HNH conformation precludes DNA cleavage. Interestingly, substrates with only 1-3 bp mismatches were cleaved at near wild-type rates despite still promoting diminished (ratio)_{A} values relative to the on-target, suggesting that rapidly interconverting conformational states, one of which is the activated state, may still enable rapid cleavage. A similar pattern of (ratio)_{A} changes was also observed using catalytically active Cas9_{HNH}, and the opposite trend of ratio(A) changes was observed with a construct designed to undergo a high-to-low FRET efficiency transition upon on-target binding (FIG. 2E). These data suggest that positioning of the HNH domain is largely unaffected by actual strand scission, but instead reflects a conformational equilibrium that is particularly sensitive to the RNA-DNA heteroduplex at the distal end of the target.

[0696] FIG. 2A-2E show data using a S355C and S867C pair for ‘far to close’ detection (e.g., low-to-high FRET detection) of on-target nucleic acid binding of Cas9. These figures illustrate that on-target binding of Cas9 to a target nucleic acid (e.g., DNA) can be detected using an amino position (e.g., S355) in the alpha-helical lobe paired with an amino acid position (e.g., S867) in the HNH domain. FRET experiments revealed an activated conformation of the HNH nuclease domain (FIG. 2A) Design of Cas9_{HNH} FRET construct; putative conformational changes of the HNH domain are indicated (arrow). Measured distances between S355 and S867 in the sgRNA/DNA-bound Cas9 structure and a model of the HNH domain docked at the cleavage site are indicated. The model was generated using an HNH homolog structure (PDB ID code 2QNC). (FIG. 2B) Fluorescence emission spectra of dCas9_{HNH} in the presence of the indicated substrates. The inset shows (ratio)_{A} values; mut, mutation. (FIG. 2C) (ratio)_{A} data for dCas9_{HNH} in the presence of the indicated DNA substrates. Mismatches were introduced sequentially from the PAM-distal end of the target. (FIG. 2D) Cleavage rate constants for the indicated DNA substrates. (FIG. 2E) (ratio)_{A} data for catalytically active Cas9_{HNH} and Cas9_{HNH-2} in the presence of the indicated DNA substrates. Error bars in FIG. 2B-2E represent the standard deviation from at least three experiments.

[0697] The HNH and RuvC nuclease domains cleave the target (complementary) and non-target (non-complementary) strands of a double stranded DNA target 3-bp upstream of the PAM, respectively. For partially unwound off-target substrates with mismatches >10-bp further upstream, target strand cleavage is prevented by conformational control of the HNH domain How then is RuvC-catalyzed cleavage of the non-target strand prevented? It was hypothesized that RuvC activity would be sensitive to conformational changes in the HNH domain. HNH and RuvC cleavage rates were separately measured for a panel of partially mismatched substrates and found that both strands were consistently cleaved in synchrony (FIG. 3A, FIG. 3B). Shorter DNA substrates with or without internal mismatches were next used, such that Cas9-mediated DNA unwinding up to the site of an sgRNA-DNA mismatch would theoretically present identical substrates to the RuvC active site. A tight correlation between RuvC cleavage kinetics and the presence of an activated HNH conformational state was observed, evidenced by dCas9_{HNH} (ratio)_{A} values (FIG. 3C), providing strong evidence that the RuvC nuclease domain is allosterically controlled by HNH conformational dynamics. Furthermore, the RuvC domain could still effectively cleave the non-target strand of a substrate that induced an activated conformation HNH conformation, but whose target strand could not be cleaved by the HNH domain due to mismatches in the seed (FIG. 3D). Together, these data argue that the RuvC nuclease activity is triggered by HNH conformational changes but does not per se require HNH nuclease activity.

[0698] FIG. 3A-3D. RuvC nuclease activity is allosterically controlled by HNH conformational changes. (FIG. 3A) Panel of DNA substrates tested, with on-target (1) at top. Matched and mismatched positions of DNA target strand sequences relative to the sgRNA are colored red and black, respectively. Some substrates contain internal mismatches between the two DNA strands; dashed lines indicate additional flanking sequence. (FIG. 3B) Kinetics of target (red) and non-target (black) strand cleavage for the indicated DNA substrates. Exponential fits are shown as solid lines. (FIG. 3C) (ratio)_{A} data for Cas9_{HNH} (red bars, left y-axis) and non-target strand cleavage kinetics of the RuvC domain (blue bars, right y-axis) for the indicated DNA substrates. (FIG. 3D) Kinetics of target (red/pink) and non-target (black/grey) strand cleavage for the indicated DNA substrates. Exponential fits are shown as solid lines. The inset shows (ratio)_{A} values for Cas9_{HNH}. Error bars in FIG. 3B-3D represent the standard deviation from at least three experiments.

[0699] How Cas9 achieves this functional coupling was next tested. The HNH domain is inserted between RuvC domain motifs II and III, but linkers connecting both domains are consistently disordered and there are relatively few inter-domain contacts. An HNH deletion construct was generated, and remarkably, ΔHNH-Cas9 retained nearly wild-type DNA binding activity while being entirely defective in non-target strand cleavage by RuvC (FIG. 4A, FIG. 4B). Thus, the HNH domain itself is required for RuvC nuclease domain activation but dispensable for RNA-guided DNA targeting.

[0700] Finally, the allosteric mechanism between the HNH and RuvC domains was investigated. It was hypothesized that two α-helices connecting the HNH and RuvC III motifs, previously shown to also adopt an extended conformation that was proposed to assist the HNH domain in approaching the cleavage site, was instead acting as a signal transducer. A series of proline residues was introduced to specifically disrupt this α-helix (FIG. 4C); it was found that target strand cleavage kinetics by the HNH domain were minimally affected (FIG. 4D). In stark contrast, RuvC nuclease activity was almost completely blocked with an E923P/T924P-Cas9 mutant, and this effect could be reversed with the corresponding alanine mutations. The finding that this effect was not confined to highly conserved residues supports the idea that general disruption of the helix-forming propensity of this region, and not specific point mutations, disabled RuvC. Thus, formation of an intact, extended α-helix acts as an allosteric switch to communicate the HNH conformational change to the RuvC domain and activate it for cleavage.

[0701] FIG. 4A-4D. Mechanism of communication between the HNH and RuvC nuclease domains to achieve concerted DNA cleavage. (FIG. 4A) Target DNA binding assay with dCas9 and ΔHNH-Cas9, resolved by native polyacrylamide gel electrophoresis (PAGE) (top). Quantified data are below; binding fits are shown as solid lines. (FIG. 4B) Target DNA cleavage assay with wild-type Cas9, dCas9, and ΔHNH-Cas9, resolved by denaturing PAGE. (FIG. 4C) Zoom-in view of the sgRNA/DNA-bound Cas9 structure¹⁴ (top) highlights the two α-helices connecting the HNH domain C-terminus and RuvC III N-terminus; a sequence alignment²³ of this region is shown at bottom. Residues mutated to proline or alanine are indicated (arrows). (FIG. 4D) Kinetics of target (red) and non-target (black) strand cleavage with the indicated Cas9 variants. Exponential fits are shown as solid lines. Error bars in FIG. 4A and FIG. 4D represent the standard deviation from at least three experiments.

### Example 2

[0702] FIG. 6A-6B show data using a E945C and D435C pair for ‘close to far’ detection (e.g., high-to-low FRET detection) of guide RNA binding to Cas9. The variant Cas9 protein included the following amino acid substitutions: C80S, C574S, E945C, and D435C. These figures illustrate that binding of Cas9 to a guide RNA can be detected using an amino position (e.g., D435) in the alpha-helical lobe paired with an amino acid position (e.g., E945) in a RuvC domain (e.g., the RuvC-III domain).

[0703] FIG. 7A-7B show data using a S867C and S355C pair for ‘far to close’ detection (e.g., low-to-high FRET detection) of on-target nucleic acid binding of Cas9. Only reactions containing on-target DNA/guide RNA exhibited the conformational change. These figures illustrate that on-target binding of Cas9 to a target nucleic acid (e.g., DNA) can be detected using an amino position (e.g., S867) in the HNH domain paired with an amino acid position (e.g., S355) in the alpha-helical lobe.

[0704] FIG. 8A-8C show data using a S867C and N1054C pair for ‘close to far’ detection (e.g., high-to-low FRET detection) of on-target nucleic acid binding of Cas9. Only reactions containing on-target DNA/guide RNA exhibited the conformational change. These figures illustrate that on-target binding of Cas9 to a target nucleic acid (e.g., DNA) can be detected using an amino position (e.g., S867) in the HNH domain paired with an amino acid position (e.g., N1054) in a RuvC domain (e.g., the RuvC-III domain).

### Example 3

[0705] FIG. 9A-9D show data using a D273C and E60C pair for ‘close to far’ detection (e.g., high-to-low FRET detection) of on-target nucleic acid binding of Cas9. These figures illustrate that on-target binding of Cas9 to a target nucleic acid (e.g., DNA) can be detected using an amino position (e.g., D273) in the helical-II domain paired with an amino acid position (e.g., E60) in the Arg domain (arginine-rich bridge helix). (FIG. 9A) Schematic of the Helical-II FRET construct (pJSC033) for monitoring Helical-II domain movements, which displayed a high FRET in the sgRNA-bound (inactive, 10 Å) to low FRET in the dsDNA-bound (active, 36 Å) state. (FIG. 9B) Bulk FRET data were measured and is represented as (ratio)_{A} values. These data show that the helical-II domain underwent reciprocal conformational changes relative to the HNH nuclease domain. (FIG. 9C) Domain architecture of Cas9 missing the Helical-II domain (pJSC065). (FIG. 9D) Bulk cleavage kinetics were measured with a Helical-II truncation mutant (pJSC065). The data showed decreased on-target cleavage but increased activity on 1-4 bp PAM-distal mismatched substrates compared to WT Cas9. The data show that the helical-II domain regulates Cas9 activity by sequestering off-target cleavage.

[0706] FIG. 10A-10F show data using a S701C and S960C pair for ‘close to far’ detection (e.g., high-to-low FRET detection) of on-target nucleic acid binding of Cas9. These figures illustrate that on-target binding of Cas9 to a target nucleic acid (e.g., DNA) can be detected using an amino position (e.g., S701) in the helical-III domain paired with an amino acid position (e.g., S960) in a RuvC domain (e.g., the RuvC-III domain). (FIG. 10A) Schematic of the Helical-III FRET construct (pJSC052) for monitoring Helical-III domain movements, which displayed high FRET in the sgRNA-bound (inactive, 30 Å) to low FRET in the dsDNA-bound (active, 40 Å) state. (FIG. 10B) Measured bulk FRET data represented as (ratio)_{A} values. The data show that the conformation of the Helical-III domain was sensitive to PAM-distal mismatches. (FIG. 10C) Domain architecture of Cas9 missing the Helical-II domain (pSHS273). (FIG. 10D) Bulk cleavage kinetics were measured. The data show that the kinetics of a Helical-III truncation mutant (pSHS273) can be rescued by adding the Helical-III domain in trans (pSHS325). Thus, the helical-III is necessary for activating the HNH nuclease upon recognition of the RNA-DNA heteroduplex at the PAM-distal end. (FIG. 10E) Measured bulk FRET data represented as (ratio)_{A} values with HNH FRET construct. The data show that addition of a Helical-III domain in trans rescues activation of the HNH domain in a Helical-III truncation mutant (pJSC038). (FIG. 10F) Measured binding to the dsDNA target reported as equilibrium dissociation constants (K_{D}). The data show that Helical-III truncation mutant in the absence (pSHS273) and presence (pSHS273+pSHS325) of the Helical-III domain in trans have similar affinity to a perfect target, but not with a 1-4 bp mismatched target.

[0707] While the present invention has been described with reference to the specific embodiments thereof, it should be understood by those skilled in the art that various changes may be made and equivalents may be substituted without departing from the true spirit and scope of the invention. In addition, many modifications may be made to adapt a particular situation, material, composition of matter, process, process step or steps, to the objective, spirit and scope of the present invention. All such modifications are intended to be within the scope of the claims appended hereto.

What is claimed is:

1. A reporter Cas9 protein, comprising:
a signal pair that produces a detectable signal, wherein the signal pair comprises a first and a second signal partner, wherein the distance between the first and second signal partners increases or decreases as a result of a conformational change of the reporter Cas9 protein, wherein:
(a) the first signal partner is a signal moiety that produces the detectable signal and the second signal partner is a quencher moiety that quenches the detectable signal; or
(b) the first signal partner is a fluorescence resonance energy transfer (FRET) donor moiety and the second signal partner is a FRET acceptor moiety that produces the detectable signal;
wherein an increase or decrease in the distance between the first and second signal partners causes a change in the amount of the detectable signal produced by the signal pair.

2. The reporter Cas9 protein of claim 1, wherein the first and second signal partners are each conjugated to a cysteine residue in the reporter Cas9 protein.

3. The reporter Cas9 protein of claim 1 or claim 2, wherein the conformational change results from:
(a) binding of the reporter Cas9 protein to a Cas9 guide RNA, or
(b) on-target binding of a Cas9 complex, comprising the reporter Cas9 protein and a Cas9 guide RNA, to a target nucleic acid molecule.

4. The reporter Cas9 protein of any of claims 1-3, wherein one signal partner of the signal pair is positioned in an alpha-helical lobe of the reporter Cas9 protein and the other signal partner of the signal pair is positioned (a) in a RuvC domain of the reporter Cas9 protein, or (b) in a PAM interaction domain of the reporter Cas9 protein.

5. The reporter Cas9 protein of claim 4, wherein:
(a) one signal partner of the signal pair is positioned in an alpha-helical lobe of the reporter Cas9 protein at an amino acid position corresponding to residue 435 of SEQ ID NO: 2 and the other signal partner of the signal pair is positioned in a RuvC domain of the reporter Cas9 protein at an amino acid position corresponding to residue 945 of SEQ ID NO: 2; or
(b) one signal partner of the signal pair is positioned in an alpha-helical lobe of the reporter Cas9 protein at an amino acid position corresponding to residue 355 of SEQ ID NO: 2 and the other signal partner of the signal pair is positioned in a PAM interaction domain of the reporter Cas9 protein at an amino acid position corresponding to residue 1328 of SEQ ID NO: 2.

6. The reporter Cas9 protein of any of claims 1-3, wherein one signal partner of the signal pair is positioned in an HNH domain of the reporter Cas9 protein and the other signal partner of the signal pair is positioned (a) in a RuvC domain of the reporter Cas9 protein, or (b) in an alpha-helical lobe of the reporter Cas9 protein.

7. The reporter Cas9 protein of claim 6, wherein one signal partner of the signal pair is positioned in an HNH domain of the reporter Cas9 protein at an amino acid position corresponding to residue 867 of SEQ ID NO: 2 and the other signal partner of the signal pair is positioned (a) in a RuvC domain of the reporter Cas9 protein at an amino acid position corresponding to residue 1054 of SEQ ID NO: 2, or (b) in an alpha-helical lobe of the reporter Cas9 protein at an amino acid position corresponding to residue 355 of SEQ ID NO: 2.

8. The reporter Cas9 protein of any of claims 1-3, wherein one signal partner of the signal pair is positioned in a Helicase-II domain of the reporter Cas9 protein and the other signal partner of the signal pair is positioned in an Arg domain of the reporter Cas9 protein.

9. The reporter Cas9 protein of claim 8, wherein one signal partner of the signal pair is positioned in a Helicase-II domain of the reporter Cas9 protein at an amino acid position corresponding to residue 273 of SEQ ID NO: 2 and the other signal partner of the signal pair is positioned in an Arg domain of the reporter Cas9 protein at an amino acid position corresponding to residue 60 of SEQ ID NO: 2.

10. The reporter Cas9 protein of any of claims 1-3, wherein one signal partner of the signal pair is positioned in a Helicase-III domain of the reporter Cas9 protein and the other signal partner of the signal pair is positioned in a RuvC domain of the reporter Cas9 protein.

11. The reporter Cas9 protein of claim 10, wherein one signal partner of the signal pair is positioned in a Helicase-III domain of the reporter Cas9 protein at an amino acid position corresponding to residue 701 of SEQ ID NO: 2 and the other signal partner of the signal pair is positioned in a RuvC domain of the reporter Cas9 protein at an amino acid position corresponding to residue 960 of SEQ ID NO: 2.

12. A method of detecting a conformational change in a reporter Cas9 protein, the method comprising:
(a) contacting
(i) the reporter Cas9 protein of any of claims 1-5 with a Cas9 guide RNA, or
(ii) the reporter Cas9 protein of any of claim 1-3 or 6-11 with a Cas9 guide RNA and a target nucleic acid; and
(b) measuring the detectable signal prior to and after said contacting.

13. A method of detecting the binding of a reporter Cas9 protein to a Cas9 guide RNA, the method comprising:
(a) contacting the reporter Cas9 protein of any of claims 1-5 with a Cas9 guide RNA, wherein said conformational change results from binding of the reporter Cas9 protein to a Cas9 guide RNA; and
(b) measuring the detectable signal prior to and after said contacting.

14. A method of detecting on-target binding of a Cas9 complex to a target nucleic acid, wherein the Cas9 complex comprises a Cas9 guide RNA and a reporter Cas9 protein of any of claim 1-3 or 6-11, the method comprising:
(a) contacting said Cas9 complex with a guide RNA and; and a target nucleic acid, wherein said conformational change results from on-target binding of the Cas9 complex to a target nucleic acid molecule; and
(b) measuring the detectable signal prior to and after said contacting.

15. A variant Cas9 protein, or a nucleic acid encoding the variant Cas9 protein, the variant Cas9 protein comprising:
a first and a second cysteine residue, wherein the distance between the first and second cysteine residues increases or decreases as a result of a conformational change of the variant Cas9 protein, wherein the conformational change results from:
(a) binding of the variant Cas9 protein to a Cas9 guide RNA, or
(b) on-target binding of a Cas9 complex, comprising the variant Cas9 protein and a Cas9 guide RNA, to a target nucleic acid molecule;
wherein the variant Cas9 protein lacks the naturally occurring cysteine residues of a corresponding wild type Cas9 protein.

16. The variant Cas9 protein of claim 15, wherein the variant Cas9 protein does not comprise more than two cysteine residues.

17. The variant Cas9 protein of claim 15 or claim 16, wherein the first cysteine residue is conjugated to a first signal partner of a signal pair and the second cysteine residue is conjugated to a second signal partner of the signal pair, wherein:
(a) one signal partner of the signal pair is a signal moiety that produces a detectable signal and the other signal partner of the signal pair is a quencher moiety that quenches the detectable signal; or
(b) one signal partner of the signal pair is a fluorescence resonance energy transfer (FRET) donor moiety and the other signal partner of the signal pair is a FRET acceptor moiety.

18. The variant Cas9 protein of any of claims 15-17, wherein the first cysteine residue is positioned in an alpha-helical lobe of the variant Cas9 protein and the second cysteine residue is positioned (a) in a RuvC domain of the variant Cas9 protein, or (b) in a PAM interaction domain of the variant Cas9 protein.

19. The variant Cas9 protein of claim 18, wherein:
(a) one of said first and second cysteine residues is positioned in an alpha-helical lobe of the variant Cas9 protein at an amino acid position corresponding to residue 435 of SEQ ID NO: 2 and the other of said first and second cysteine residues is positioned in a RuvC domain of the variant Cas9 protein at an amino acid position corresponding to residue 945 of SEQ ID NO: 2; or
(b) one of said first and second cysteine residues is positioned in an alpha-helical lobe of the variant Cas9 protein at an amino acid position corresponding to residue 355 of SEQ ID NO: 2 and the other of said first and second cysteine residues is positioned in a PAM interaction domain of the variant Cas9 protein at an amino acid position corresponding to residue 1328 of SEQ ID NO: 2.

20. The variant Cas9 protein of any of claims 15-17, wherein the first cysteine residue is positioned in an HNH domain of the variant Cas9 protein and the second cysteine residue is positioned (a) in a RuvC domain of the variant Cas9 protein, or (b) in an alpha-helical lobe of the variant Cas9 protein.

21. The variant Cas9 protein of claim 20, wherein one of said first and second cysteine residues is positioned in an HNH domain of the variant Cas9 protein at an amino acid position corresponding to residue 867 of SEQ ID NO: 2 and the other of said first and second cysteine residues is positioned (a) in a RuvC domain of the variant Cas9 protein at an amino acid position corresponding to residue 1054 of SEQ ID NO: 2, or (b) in an alpha-helical lobe of the variant Cas9 protein at an amino acid position corresponding to residue 355 of SEQ ID NO: 2.

22. The variant Cas9 protein of any of claims 15-17, wherein the first cysteine residue is positioned in a Helicase-II domain of the variant Cas9 protein and the second cysteine residue is positioned in an Arg domain of the reporter Cas9 protein.

23. The variant Cas9 protein of claim 22, wherein one of said first and second cysteine residues is positioned in a Helicase-II domain of the reporter Cas9 protein at an amino acid position corresponding to residue 273 of SEQ ID NO: 2 and the other of said first and second cysteine residues is positioned in an Arg domain of the variant Cas9 protein at an amino acid position corresponding to residue 60 of SEQ ID NO: 2.

24. The variant Cas9 protein of any of claims 15-17, wherein the first cysteine residue is positioned in a Helicase-III domain of the variant Cas9 protein and the second cysteine residue is positioned in a RuvC domain of the reporter Cas9 protein.

25. The variant Cas9 protein of claim 24, wherein one of said first and second cysteine residues is positioned in a Helicase-III domain of the variant Cas9 protein at an amino acid position corresponding to residue 701 of SEQ ID NO: 2 and the other of said first and second cysteine residues is positioned in a RuvC domain of the variant Cas9 protein at an amino acid position corresponding to residue 960 of SEQ ID NO: 2.

26. A nucleic acid encoding the variant Cas9 protein of any of claims 15-25.

27. A method of labeling a variant Cas9 protein to generate a reporter Cas9 protein, the method comprising attaching a first and a second signal partner of a signal pair to the first and second cysteines of the variant Cas9 protein of any of claims 15-25.

28. The method according to claim 27, wherein:
(a) the first signal partner is a signal moiety that produces a detectable signal and the second signal partner is a quencher moiety that quenches the detectable signal; or
(b) the first signal partner is a fluorescence resonance energy transfer (FRET) donor moiety and the second signal partner is a FRET acceptor moiety that produces the detectable signal;

29. The method according to claim 27 or claim 28, wherein the first and second signal partners are attached to the variant Cas9 protein simultaneously.

30. The method according to claim 27 or claim 28, wherein one signal partner of the signal pair is attached to the variant Cas9 protein before the other signal partner of the signal pair is attached to the variant Cas9 protein.

31. The method according to claim 27 or claim 28, wherein the method comprises:
attaching one of: a FRET donor moiety and a FRET acceptor moiety of a FRET pair, to a population of the variant Cas9 protein, to generate a population of label-contacted variant Cas9 proteins;
contacting the population of label-contacted variant Cas9 proteins with an activated thiol that is attached to a solid support to generate a population of supported label-contacted variant Cas9 proteins;
isolating the solid support to remove variant Cas9 proteins that are not attached to the solid support;
removing the solid support by contacting the population of supported label-contacted variant Cas9 proteins with a reducing agent to generate an enriched population of label-contacted variant Cas9 proteins; and
attaching the other of the FRET donor moiety and the FRET acceptor moiety of the FRET pair to the enriched population of label-contacted variant Cas9 proteins to generate a population of variant Cas9 proteins enriched for reporter Cas9 proteins.

32. A kit for detecting Cas9 conformational changes, the kit comprising:
(i) the variant Cas9 protein of any of claims 15-25, or a nucleic acid encoding said variant Cas9 protein; and
(ii) one or more of: a signal moiety, a quencher moiety, a signal pair comprising a signal moiety and a quencher moiety, a fluorescence resonance energy transfer (FRET) donor moiety, a FRET acceptor moiety, and a FRET pair comprising a FRET donor moiety and a FRET acceptor moiety.

The application's sequence listing, which the Patent Office published only in electronic form, follows.

SEQUENCE LISTING (1635 sequences)

SEQ ID NO: 1 - protein, 1056 aa, Pasteurella multocida
MQTTNLSYILGLDLGIASVGWAVVEINENEDPIGLIDVGVRIFERAEVPKTGESLALSRRLARSTRRLIRRRAHRLLLAKRFLKREGILSTIDLEKGLPNQAWELRVAGLERRLSAIEWGAVLLHLIKHRGYLSKRKNESQTNNKELGALLSGVAQNHQLLQSDDYRTPAELALKKFAKEEGHIRNQRGAYTHTFNRLDLLAELNLLFAQQHQFGNPHCKEHIQQYMTELLMWQKPALSGEAILKMLGKCTHEKNEFKAAKHTYSAERFVWLTKLNNLRILEDGAERALNEEERQLLINHPYEKSKLTYAQVRKLLGLSEQAIFKHLRYSKENAESATFMELKAWHAIRKALENQGLKDTWQDLAKKPDLLDEIGTAFSLYKTDEDIQQYLTNKVPNSVINALLVSLNFDKFIELSLKSLRKILPLMEQGKRYDQACREIYGHHYGEANQKTSQLLPAIPAQEIRNPVVLRTLSQARKVINAIIRQYGSPARVHIETGRELGKSFKERREIQKQQEDNRTKRESAVQKFKELFSDFSSEPKSKDILKFRLYEQQHGKCLYSGKEINIHRLNEKGYVEIDHALPFSRTWDDSFNNKVLVLASENQNKGNQTPYEWLQGKINSERWKNFVALVLGSQCSAAKKQRLLTQVIDDNKFIDRNLNDTRYIARFLSNYIQENLLLVGKNKKNVFTPNGQITALLRSRWGLIKARENNNRHHALDAIVVACATPSMQQKITRFIRFKEVHPYKIENRYEMVDQESGEIISPHFPEPWAYFRQEVNIRVFDNHPDTVLKEMLPDRPQANHQFVQPLFVSRAPTRKMSGQGHMETIKSAKRLAEGISVLRIPLTQLKPNLLENMVNKEREPALYAGLKARLAEFNQDPAKAFATPFYKQGGQQVKAIRVEQVQKSGVLVRENNGVADNASIVRTDVFIKNNKFFLVPIYTWQVAKGILPNKAIVAHKNEDEWEEMDEGAKFKFSLFPNDLVELKTKKEYFFGYYIGLDRATGNISLKEHDGEISKGKDGVYRVGVKLALSFEKYQVDELGKNRQICRPQQRQPVR

SEQ ID NO: 2 - protein, 1368 aa, Streptococcus pyogenes [sequence omitted]

SEQ ID NO: 3 - protein, 1334 aa, Listeria innocua
MKKPYTIGLDIGTNSVGWAVLTDQYDLVKRKMKIAGDSEKKQIKKNFWGVRLFDEGQTAADRRMARTARRRIERRRNRISYLQGIFAEEMSKTDANFFCRLSDSFYVDNEKRNSRHPFFATIEEEVEYHKNYPTIYHLREELVNSSEKADLRLVYLALAHIIKYRGNFLIEGALDTQNTSVDGIYKQFIQTYNQVFASGIEDGSLKKLEDNKDVAKILVEKVTRKEKLERILKLYPGEKSAGMFAQFISLIVGSKGNFQKPFDLIEKSDIECAKDSYEEDLESLLALIGDEYAELFVAAKNAYSAVVLSSIITVAETETNAKLSASMIERFDTHEEDLGELKAFIKLHLPKHYEEIFSNTEKHGYAGYIDGKTKQADFYKYMKMTLENIEGADYFIAKIEKENFLRKQRTFDNGAIPHQLHLEELEAILHQQAKYYPFLKENYDKIKSLVTFRIPYFVGPLANGQSEFAWLTRKADGEIRPWNIEEKVDFGKSAVDFIEKMTNKDTYLPKENVLPKHSLCYQKYLVYNELTKVRYINDQGKTSYFSGQEKEQIFNDLFKQKRKVKKKDLELFLRNMSHVESPTIEGLEDSFNSSYSTYHDLLKVGIKQEILDNPVNTEMLENIVKILTVFEDKRMIKEQLQQFSDVLDGVVLKKLERRHYTGWGRLSAKLLMGIRDKQSHLTILDYLMNDDGLNRNLMQLINDSNLSFKSIIEKEQVTTADKDIQSIVADLAGSPAIKKGILQSLKIVDELVSVMGYPPQTIVVEMARENQTTGKGKNNSRPRYKSLEKAIKEFGSQILKEHPTDNQELRNNRLYLYYLQNGKDMYTGQDLDIHNLSNYDIDHIVPQSFITDNSIDNLVLTSSAGNREKGDDVPPLEIVRKRKVFWEKLYQGNLMSKRKFDYLTKAERGGLTEADKARFIHRQLVETRQITKNVANILHQRFNYEKDDHGNTMKQVRIVTLKSALVSQFRKQFQLYKVRDVNDYHHAHDAYLNGVVANTLLKVYPQLEPEFVYGDYHQFDWFKANKATAKKQFYTNIMLFFAQKDRIIDENGEILWDKKYLDTVKKVMSYRQMNIVKKTEIQKGEFSKATIKPKGNSSKLIPRKTNWDPMKYGGLDSPNMAYAVVIEYAKGKNKLVFEKKIIRVTIMERKAFEKDEKAFLEEQGYRQPKVLAKLPKYTLYECEEGRRRMLASANEAQKGNQQVLPNHLVTLLHHAANCEVSDGKSLDYIESNREMFAELLAHVSEFAKRYTLAEANLNKINQLFEQNKEGDIKAIAQSFVDLMAFNAMGAPASFKFFETTIERKRYNNLKELLNSTIIYQSITGLYESRKRLDD

SEQ ID NO: 4 - protein, 1368 aa, Streptococcus pyogenes
MDKKYSIGLDIGTNSVGWAVITDDYKVPSKKLKGLGNTDRHGIKKNLIGALLFDSGETAEATRLKRTARRRYTRRKNRICYLQEIFSNEMAKVDDSFFHRLEESFLVEEDKKHERHPIFGNIVDEVAYHEKYPTIYHLRKKLADSTDKVDLRLIYLALAHMIKFRGHFLIEGDLNPDNSDVDKLFIQLVQTYNQLFEENPINASRVDAKAILSARLSKSRRLENLIAQLPGEKKNGLFGNLIALSLGLTPNFKSNFDLAEDAKLQLSKDTYDDDLDNLLAQIGDQYADLFLAAKNLSDATLLSDILRVNSEITKAPLSASMIKRYDEHHQDLTLLKALVRQQLPEKYKEIFFDQSKNGYAGYIDGGASQEEFYKFIKPILEKMDGTEELLAKLNREDLLRKQRTFDNGSIPYQIHLGELHAILRRQEDFYPFLKDNREKIEKILTFRIPYYVGPLARGNSRFAWMTRKSEETITPWNFEEVVDKGASAQSFIERMTNFDKNLPNEKVLPKHSLLYEYFTVYNELTKVKYVTEGMRKPAFLSGEQKKAIVDLLFKTNRKVTVKQLKEDYFKKIECFDSVEISGVEDRFNASLGTYHDLLKIIKDKDFLDNEENEDILEDIVLTLTLFEDREMIEERLKTYAHLFDDKVMKQLKRRRYTGWGRLSRKLINGIRDKQSGKTILDFLKSDGFANRNFMQLIHDDSLTFKEDIQKAQVSGQGDSLHEHIANLAGSPAIKKGILQTVKVVDELVKVMGRHKPENIVIEMARENQTTQKGQKNSRERMKRIEEGIKELGSDILKEYPVENTQLQNEKLYLYYLQNGRDMYVDQELDINRLSDYDVDHIVPQSFLKDDSIDNKVLTRSDKNRGKSDNVPSEEVVKKMKNYWRQLLNAKLITQRKFDNLTKAERGGLSELDKVGFIKRQLVETRQITKHVAQILDSRMNTKYDENDKLIREVRVITLKSKLVSDFRKDFQFYKVREINNYHHAHDAYLNAVVGTALIKKYPKLESEFVYGDYKVYDVRKMIAKSEQEIGKATAKYFFYSNIMNFFKTEITLANGEIRKRPLIETNGETGEIVWDKGRDFATVRKVLSMPQVNIVKKTEVQTGGFSKESILPKRNSDKLIARKKDWDPKKYGGFDSPTVAYSVLVVAKVEKGKSKKLKSVKELLGITIMERSSFEKDPIDFLEAKGYKEVRKDLIIKLPKYSLFELENGRKRMLASAGELQKGNELALPSKYVNFLYLASHYEKLKGSPEDNEQKQLFVEQHKHYLDEIIEQISEFSKRVILADANLDKVLSAYNKHRDKPIREQAENIIHLFTLTNLGAPAAFKYFDTTIDRKRYTSTKEVLDATLIHQSITGLYETRIDLSQLGGD

SEQ ID NO: 5 - protein, 1370 aa, Streptococcus agalactiae
MNKPYSIGLDIGTNSVGWSIITDDYKVPAKKMRVLGNTDKEYIKKNLIGALLFDGGNTAADRRLKRTARRRYTRRRNRILYLQEIFAEEMSKVDDSFFHRLEDSFLVEEDKRGSKYPIFATLQEEKDYHEKFSTIYHLRKELADKKEKADLRLIYIALAHIIKFRGHFLIEDDSFDVRNTDISKQYQDFLEIFNTTFENNDLLSQNVDVEAILTDKISKSAKKDRILAQYPNQKSTGIFAEFLKLIVGNQADFKKYFNLEDKTPLQFAKDSYDEDLENLLGQIGDEFADLFSAAKKLYDSVLLSGILTVIDLSTKAPLSASMIQRYDEHREDLKQLKQFVKASLPEKYQEIFADSSKDGYAGYIEGKTNQEAFYKYLSKLLTKQEDSENFLEKIKNEDFLRKQRTFDNGSIPHQVHLTELKAIIRRQSEYYPFLKENQDRIEKILTFRIPYYIGPLAREKSDFAWMTRKTDDSIRPWNFEDLVDKEKSAEAFIHRMTNNDFYLPEEKVLPKHSLIYEKFTVYNELTKVRYKNEQGETYFFDSNIKQEIFDGVFKEHRKVSKKKLLDFLAKEYEEFRIVDVIGLDKENKAFNASLGTYHDLEKILDKDFLDNPDNESILEDIVQTLTLFEDREMIKKRLENYKDLFTESQLKKLYRRHYTGWGRLSAKLINGIRDKESQKTILDYLIDDGRSNRNFMQLINDDGLSFKSIISKAQAGSHSDNLKEVVGELAGSPAIKKGILQSLKIVDELVKVMGYEPEQIVVEMARENQTTNQGRRNSRQRYKLLDDGVKNLASDLNGNILKEYPTDNQALQNERLFLYYLQNGRDMYTGEALDIDNLSQYDIDHIIPQAFIKDDSIDNRVLVSSAKNRGKSDDVPSLEIVKDCKVFWKKLLDAKLMSQRKYDNLTKAERGGLTSDDKARFIQRQLVETRQITKHVARILDERFNNELDSKGRRIRKVKIVTLKSNLVSNFRKEFGFYKIREVNNYHHAHDAYLNAVVAKAILTKYPQLEPEFVYGDYPKYNSYKTRKSATEKLFFYSNIMNFFKTKVTLADGTVVVKDDIEVNNDTGEIVWDKKKHFATVRKVLSYPQNNIVKKTEIQTGGFSKESILAHGNSDKLIPRKTKDIYLDPKKYGGFDSPIVAYSVLVVADIKKGKAQKLKTVTELLGITIMERSRFEKNPSAFLESKGYLNIRADKLIILPKYSLFELENGRRRLLASAGELQKGNELALPTQFMKFLYLASRYNESKGKPEEIEKKQEFVNQHVSYFDDILQLINDFSKRVILADANLEKINKLYQDNKENISVDELANNIINLFTFTSLGAPAAFKFFDKIVDRKRYTSTKEVLNSTLIHQSITGLYETRIDLGKLGED

SEQ ID NO: 6 - protein, 1345 aa, Streptococcus mutans
MKKPYSIGLDIGTNSVGWAVVTDDYKVPAKKMKVLGNTDKSHIEKNLLGALLFDSGNTAEDRRLKRTARRRYTRRRNRILYLQEIFSEEMGKVDDSFFHRLEDSFLVTEDKRGERHPIFGNLEEEVKYHENFPTIYHLRQYLADNPEKVDLRLVYLALAHIIKFRGHFLIEGKFDTRNNDVQRLFQEFLAVYDNTFENSSLQEQNVQVEEILTDKISKSAKKDRVLKLFPNEKSNGRFAEFLKLIVGNQADFKKHFELEEKAPLQFSKDTYEEELEVLLAQIGDNYAELFLSAKKLYDSILLSGILTVTDVGTKAPLSASMIQRYNEHQMDLAQLKQFIRQKLSDKYNEVFSDVSKDGYAGYIDGKTNQEAFYKYLKGLLNKIEGSGYFLDKIEREDFLRKQRTFDNGSIPHQIHLQEMRAIIRRQAEFYPFLADNQDRIEKLLTFRIPYYVGPLARGKSDFAWLSRKSADKITPWNFDEIVDKESSAEAFINRMTNYDLYLPNQKVLPKHSLLYEKFTVYNELTKVKYKTEQGKTAFFDANMKQEIFDGVFKVYRKVTKDKLMDFLEKEFDEFRIVDLTGLDKENKVFNASYGTYHDLCKILDKDFLDNSKNEKILEDIVLTLTLFEDREMIRKRLENYSDLLTKEQVKKLERRHYTGWGRLSAELIHGIRNKESRKTILDYLIDDGNSNRNFMQLINDDALSFKEEIAKAQVIGETDNLNQVVSDIAGSPAIKKGILQSLKIVDELVKIMGHQPENIVVEMARENQFTNQGRRNSQQRLKGLTDSIKEFGSQILKEHPVENSQLQNDRLFLYYLQNGRDMYTGEELDIDYLSQYDIDHIIPQAFIKDNSIDNRVLTSSKENRGKSDDVPSKDVVRKMKSYWSKLLSAKLITQRKFDNLTKAERGGLTDDDKAGFIKRQLVETRQITKHVARILDERFNTETDENNKKIRQVKIVTLKSNLVSNFRKEFELYKVREINDYHHAHDAYLNAVIGKALLGVYPQLEPEFVYGDYPHFHGHKENKATAKKFFYSNIMNFFKKDDVRTDKNGEIIWKKDEHISNIKKVLSYPQVNIVKKVEEQTGGFSKESILPKGNSDKLIPRKTKKFYWDTKKYGGFDSPIVAYSILVIADIEKGKSKKLKTVKALVGVTIMEKMTFERDPVAFLERKGYRNVQEENIIKLPKYSLFKLENGRKRLLASARELQKGNEIVLPNHLGTLLYHAKNIHKVDEPKHLDYVDKHKDEFKELLDVVSNFSKKYTLAEGNLEKIKELYAQNNGEDLKELASSFINLLTFTAIGAPATFKFFDKNIDRKRYTSTTEILNATLIHQSITGLYETRIDLNKLGGD

SEQ ID NO: 7 - protein, 1377 aa, Streptococcus agalactiae
MNKPYSIGLDIGTNSVGWSIITDDYKVPAKKMRVLGNTDKEYIKKNLIGALLFDGGNTAADRRLKRTARRRYTRRRNRILYLQEIFAEEMSKVDDSFFHRLEDSFLVEEDKRGSKYPIFATMQEEKYYHEKFPTIYHLRKELADKKEKADLRLVYLALAHIIKFRGHFLIEDDRFDVRNTDIQKQYQAFLEIFDTTFENNHLLSQNVDVEAILTDKISKSAKKDRILAQYPNQKSTGIFAEFLKLIVGNQADFKKHFNLEDKTPLQFAKDSYDEDLENLLGQIGDEFADLFSVAKKLYDSVLLSGILTVTDLSTKAPLSASMIQRYDEHHEDLKHLKQFVKASLPENYREVFADSSKDGYAGYIEGKTNQEAFYKYLLKLLTKQEGSEYFLEKIKNEDFLRKQRTFDNGSIPHQVHLTELRAIIRRQSEYYPFLKENQDRIEKILTFRIPYYVGPLAREKSDFAWMTRKTDDSIRPWNFEDLVDKEKSAEAFIHRMTNNDLYLPEEKVLPKHSLIYEKFTVYNELTKVRFLAEGFKDFQFLNRKQKETIFNSLFKEKRKVTEKDIISFLNKVDGYEGIAIKGIEKQFNASLSTYHDLKKILGKDFLDNTDNELILEDIVQTLTLFEDREMIKKCLDIYKDFFTESQLKKLYRRHYTGWGRLSAKLINGIRNKENQKTILDYLIDDGSANRNFMQLINDDDLSFKPIIDKARTGSHSDNLKEVVGELAGSPAIKKGILQSLKIVDELVKVMGYEPEQIVVEMARENQTTAKGLSRSRQRLTTLRESLANLKSNILEEKKPKYVKDQVENHHLSDDRLFLYYLQNGRDMYTKKALDIDNLSQYDIDHIIPQAFIKDDSIDNRVLVSSAKNRGKSDDVPSIEIVKARKMFWKNLLDAKLMSQRKYDNLTKAERGGLTSDDKARFIQRQLVETRQITKHVARILDERFNNEVDNGKKICKVKIVTLKSNLVSNFRKEFGFYKIREVNDYHHAHDAYLNAVVAKAILTKYPQLEPEFVYGMYRQKKLSKIVHEDKEEKYSEATRKMFFYSNLMNMFKRVVRLADGSIVVRPVIETGRYMRKTAWDKKKHFATVRKVLSYPQNNIVKKTEIQTGGFSKESILAHGNSDKLIPRKTKDIYLDPKKYGGFDSPIVAYSVLVVADIKKGKAQKLKTVTELLGITIMERSRFEKNPSAFLESKGYLNIRDDKLMILPKYSLFELENGRRRLLASAGELQKGNELALPTQFMKFLYLASRYNESKGKPEEIEKKQEFVNQHVSYFDDILQLINDFSKRVILADANLEKINKLYQDNKENIPVDELANNIINLFTFTSLGAPAAFKFFDKIVDRKRYTSTKEVLNSTLIHQSITGLYETRIDLGKLGED

SEQ ID NO: 8 - protein, 1368 aa, Streptococcus pyogenes; identical to SEQ ID NO: 4

SEQ ID NO: 9 - protein, 131 aa, Helicobacter hepaticus
MRILGFDIGITSIGWAYVESNELKDCGVRIFTKAENPKNGDSLAAPRREARGARRRLARRKARLNAIKRLLCKEFELNLNDYLANDGELPKAYQTSKDTKSPYELYTAFHWIIFAFCSIASSLSNRQMLPI

SEQ ID NO: 10 - protein, 1059 aa, Wolinella succinogenes
MIERILGVDLGISSLGWAIVEYDKDDEAANRIIDCGVRLFTAAETPKKKESPNKARREARGIRRVLNRRRVRMNMIKKLFLRAGLIQDVDLDGEGGMFYSKANRADVWELRHDGLYRLLKGDELARVLIHIAKHRGYKFIGDDEADEESGKVKKAGVVLRQNFEAAGCRTVGEWLWRERGANGKKRNKHGDYEISIHRDLLVEEVEAIFVAQQEMRSTIATDALKAAYREIAFFVRPMQRIEKMVGHCTYFPEERRAPKSAPTAEKFIAISKFFSTVIIDNEGWEQKIIERKTLEELLDFAVSREKVEFRHLRKFLDLSDNEIFKGLHYKGKPKTAKKREATLFDPNEPTELEFDKVEAEKKAWISLRGAAKLREALGNEFYGRFVALGKHADEATKILTYYKDEGQKRRELTKLPLEAEMVERLVKIGFSDFLKLSLKAIRDILPAMESGARYDEAVLMLGVPHKEKSAILPPLNKTDIDILNPTVIRAFAQFRKVANALVRKYGAFDRVHFELAREINTKGEIEDIKESQRKNEKERKEAADWIAETSFQVPLTRKNILKKRLYIQQDGRCAYTGDVIELERLFDEGYCEIDHILPRSRSADDSFANKVLCLARANQQKTDRTPYEWFGHDAARWNAFETRTSAPSNRVRTGKGKIDRLLKKNFDENSEMAFKDRNLNDTRYMARAIKTYCEQYWVFKNSHTKAPVQVRSGKLTSVLRYQWGLESKDRESHTHHAVDAIIIAFSTQGMVQKLSEYYRFKETHREKERPKLAVPLANFRDAVEEATRIENTETVKEGVEVKRLLISRPPRARVTGQAHEQTAKPYPRIKQVKNKKKWRLAPIDEEKFESFKADRVASANQKNFYETSTIPRVDVYHKKGKFHLVPIYLHEMVLNELPNLSLGTNPEAMDENFFKFSIFKDDLISIQTQGTPKKPAKIIMGYFKNMHGANMVLSSINNSPCEGFTCTPVSMDKKHKDKCKLCPEENRIAGRCLQGFLDYWSQEGLRPPRKEFECDQGVKFALDVKKYQIDPLGYYYEVKQEKRLGTIPQMRSAKKLVKK

SEQ ID NO: 11 - protein, 1409 aa, Wolinella succinogenes
MLVSPISVDLGGKNTGFFSFTDSLDNSQSGTVIYDESFVLSQVGRRSKRHSKRNNLRNKLVKRLFLLILQEHHGLSIDVLPDEIRGLFNKRGYTYAGFELDEKKKDALESDTLKEFLSEKLQSIDRDSDVEDFLNQIASNAESFKDYKKGFEAVFASATHSPNKKLELKDELKSEYGENAKELLAGLRVTKEILDEFDKQENQGNLPRAKYFEELGEYIATNEKVKSFFDSNSLKLTDMTKLIGNISNYQLKELRRYFNDKEMEKGDIWIPNKLHKITERFVRSWHPKNDADRQRRAELMKDLKSKEIMELLTTTEPVMTIPPYDDMNNRGAVKCQTLRLNEEYLDKHLPNWRDIAKRLNHGKFNDDLADSTVKGYSEDSTLLHRLLDTSKEIDIYELRGKKPNELLVKTLGQSDANRLYGFAQNYYELIRQKVRAGIWVPVKNKDDSLNLEDNSNMLKRCNHNPPHKKNQIHNLVAGILGVKLDEAKFAEFEKELWSAKVGNKKLSAYCKNIEELRKTHGNTFKIDIEELRKKDPAELSKEEKAKLRLTDDVILNEWSQKIANFFDIDDKHRQRFNNLFSMAQLHTVIDTPRSGFSSTCKRCTAENRFRSETAFYNDETGEFHKKATATCQRLPADTQRPFSGKIERYIDKLGYELAKIKAKELEGMEAKEIKVPIILEQNAFEYEESLRKSKTGSNDRVINSKKDRDGKKLAKAKENAEDRLKDKDKRIKAFSSGICPYCGDTIGDDGEIDHILPRSHTLKIYGTVFNPEGNLIYVHQKCNQAKADSIYKLSDIKAGVSAQWIEEQVANIKGYKTFSVLSAEQQKAFRYALFLQNDNEAYKKVVDWLRTDQSARVNGTQKYLAKKIQEKLTKMLPNKHLSFEFILADATEVSELRRQYARQNPLLAKAEKQAPSSHAIDAVMAFVARYQKVFKDGTPPNADEVAKLAMLDSWNPASNEPLTKGLSTNQKIEKMIKSGDYGQKNMREVFGKSIFGENAIGERYKPIVVQEGGYYIGYPATVKKGYELKNCKVVTSKNDIAKLEKIIKNQDLISLKENQYIKIFSINKQTISELSNRYFNMNYKNLVERDKEIVGLLEFIVENCRYYTKKVDVKFAPKYIHETKYPFYDDWRRFDEAWRYLQENQNKTSSKDRFVIDKSSLNEYYQPDKNEYKLDVDTQPIWDDFCRWYFLDRYKTANDKKSIRIKARKTFSLLAESGVQGKVFRAKRKIPTGYAYQALPMDNNVIAGDYANILLEANSKTLSLVPKSGISIEKQLDKKLDVIKKTDVRGLAIDNNSFFNADFDTHGIRLIVENTSVKVGNFPISAIDKSAKRMIFRALFEKEKGKRKKKTTISFKESGPVQDYLKVFLKKIVKIQLRTDGSISNIVVRKNAADFTLSFRSEHIQKLLK

SEQ ID NO: 12 - protein, 1374 aa, Fusobacterium nucleatum
MKKQKFSDYYLGFDIGTNSVGWCVTDLDYNVLRFNKKDMWGSRLFDEAKTAAERRVQRNSRRRLKRRKWRLNLLEEIFSDEIMKIDSNFFRRLKESSLWLEDKNSKEKFTLFNDDNYKDYDFYKQYPTIFHLRDELIKNPEKKDIRLIYLALHSIFKSRGHFLFEGQNLKEIKNFETLYNNLISFLEDNGINKSIDKDNIEKLEKIICDSGKGLKDKEKEFKGIFNSDKQLVAIFKLSVGSSVSLNDLFDTDEYKKEEVEKEKISFREQIYEDDKPIYYSILGEKIELLDIAKSFYDFMVLNNILSDSNYISEAKVKLYEEHKKDLKNLKYIIRKYNKENYDKLFKDKNENNYPAYIGLNKEKDKKEVVEKSRLKIDDLIKVIKGYLPKPERIEEKDKTIFNEILNKIELKTILPKQRISDNGTLPYQIHEVELEKILENQSKYYDFLNYEENGVSTKDKLLKTFKFRIPYYVGPLNSYHKDKGGNSWIVRKEEGKILPWNFEQKVDIEKSAEEFIKRMTNKCTYLNGEDVIPKDSFLYSEYIILNELNKVQVNDEFLNEENKRKIIDELFKENKKVSEKKFKEYLLVNQIANRTVELKGIKDSFNSNYVSYIKFKDIFGEKLNLDIYKEISEKSILWKCLYGDDKKIFEKKIKNEYGDILNKDEIKKINSFKFNTWGRLSEKLLTGIEFINLETGECYSSVMEALRRTNYNLMELLSSKFTLQESIDNENKEMNEVSYRDLIEESYVSPSLKRAILQTLKIYEEIKKITGRVPKKVFIEMARGGDESMKNKKIPARQEQLKKLYDSCGNDIANFSIDIKEMKNSLSSYDNNSLRQKKLYLYYLQFGKCMYTGREIDLDRLLQNNDTYDIDHIYPRSKVIKDDSFDNLVLVLKNENAEKSNEYPVKKEIQEKMKSFWRFLKEKNFISDEKYKRLTGKDDFELRGFMARQLVNVRQTTKEVGKILQQIEPEIKIVYSKAEIASSFREMFDFIKVRELNDTHHAKDAYLNIVAGNVYNTKFTEKPYRYLQEIKENYDVKKIYNYDIKNAWDKENSLEIVKKNMEKNTVNITRFIKEEKGELFNLNPIKKGETSNEIISIKPKLYDGKDNKLNEKYGYYTSLKAAYFIYVEHEKKNKKVKTFERITRIDSTLIKNEKNLIKYLVSQKKLLNPKIIKKIYKEQTLIIDSYPYTFTGVDSNKKVELKNKKQLYLEKKYEQILKNALKFVEDNQGETEENYKFIYLKKRNNNEKNETIDAVKERYNIEFNEMYDKFLEKLSSKDYKNYINNKLYTNFLNSKEKFKKLKLWEKSLILREFLKIFNKNTYGKYEIKDSQTKEKLFSFPEDTGRIRLGQSSLGNNKELLEESVTGLFVKKIKL

SEQ ID NO: 13 - protein, 1084 aa, Corynebacterium diphtheriae
MKYHVGIDVGTFSVGLAAIEVDDAGMPIKTLSLVSHIHDSGLDPDEIKSAVTRLASSGIARRTRRLYRRKRRRLQQLDKFIQRQGWPVIELEDYSDPLYPWKVRAELAASYIADEKERGEKLSVALRHIARHRGWRNPYAKVSSLYLPDGPSDAFKAIREEIKRASGQPVPETATVGQMVTLCELGTLKLRGEGGVLSARLQQSDYAREIQEICRMQEIGQELYRKIIDVVFAAESPKGSASSRVGKDPLQPGKNRALKASDAFQRYRIAALIGNLRVRVDGEKRILSVEEKNLVFDHLVNLTPKKEPEWVTIAEILGIDRGQLIGTATMTDDGERAGARPPTHDTNRSIVNSRIAPLVDWWKTASALEQHAMVKALSNAEVDDFDSPEGAKVQAFFADLDDDVHAKLDSLHLPVGRAAYSEDTLVRLTRRMLSDGVDLYTARLQEFGIEPSWTPPTPRIGEPVGNPAVDRVLKTVSRWLESATKTWGAPERVIIEHVREGFVTEKRAREMDGDMRRRAARNAKLFQEMQEKLNVQGKPSRADLWRYQSVQRQNCQCAYCGSPITFSNSEMDHIVPRAGQGSTNTRENLVAVCHRCNQSKGNTPFAIWAKNTSIEGVSVKEAVERTRHWVTDTGMRSTDFKKFTKAVVERFQRATMDEEIDARSMESVAWMANELRSRVAQHFASHGTTVRVYRGSLTAEARRASGISGKLKFFDGVGKSRLDRRHHAIDAAVIAFTSDYVAETLAVRSNLKQSQAHRQEAPQWREFTGKDAEHRAAWRVWCQKMEKLSALLTEDLRDDRVVVMSNVRLRLGNGSAHKETIGKLSKVKLSSQLSVSDIDKASSEALWCALTREPGFDPKEGLPANPERHIRVNGTHVYAGDNIGLFPVSAGSIALRGGYAELGSSFHHARVYKITSGKKPAFAMLRVYTIDLLPYRNQDLFSVELKPQTMSMRQAEKKLRDALATGNAEYLGWLVVDDELVVDTSKIATDQVKAVEAELGTIRRWRVDGFFSPSKLRLRPLQMSKEGIKKESAPELSKIIDRPGWLPAVNKLFSDGNVTVVRRDSLGRVRLESTAHLPVTWKVQ

SEQ ID NO: 14 - protein, 1395 aa, Treponema denticola
MKKEIKDYFLGLDVGTGSVGWAVTDTDYKLLKANRKDLWGMRCFETAETAEVRRLHRGARRRIERRKKRIKLLQELFSQEIAKTDEGFFQRMKESPFYAEDKTILQENTLFNDKDFADKTYHKAYPTINHLIKAWIENKVKPDPRLLYLACHNIIKKRGHFLFEGDFDSENQFDTSIQALFEYLREDMEVDIDADSQKVKEILKDSSLKNSEKQSRLNKILGLKPSDKQKKAITNLISGNKINFADLYDNPDLKDAEKNSISFSKDDFDALSDDLASILGDSFELLLKAKAVYNCSVLSKVIGDEQYLSFAKVKIYEKHKTDLTKLKNVIKKHFPKDYKKVFGYNKNEKNNNNYSGYVGVCKTKSKKLIINNSVNQEDFYKFLKTILSAKSEIKEVNDILTEIETGTFLPKQISKSNAEIPYQLRKMELEKILSNAEKHFSFLKQKDEKGLSHSEKIIMLLTFKIPYYIGPINDNHKKFFPDRCWVVKKEKSPSGKTTPWNFFDHIDKEKTAEAFITSRTNFCTYLVGESVLPKSSLLYSEYTVLNEINNLQIIIDGKNICDIKLKQKIYEDLFKKYKKITQKQISTFIKHEGICNKTDEVIILGIDKECTSSLKSYIELKNIFGKQVDEISTKNMLEEIIRWATIYDEGEGKTILKTKIKAEYGKYCSDEQIKKILNLKFSGWGRLSRKFLETVTSEMPGFSEPVNIITAMRETQNNLMELLSSEFTFTENIKKINSGFEDAEKQFSYDGLVKPLFLSPSVKKMLWQTLKLVKEISHITQAPPKKIFIEMAKGAELEPARTKTRLKILQDLYNNCKNDADAFSSEIKDLSGKIENEDNLRLRSDKLYLYYTQLGKCMYCGKPIEIGHVFDTSNYDIDHIYPQSKIKDDSISNRVLVCSSCNKNKEDKYPLKSEIQSKQRGFWNFLQRNNFISLEKLNRLTRATPISDDETAKFIARQLVETRQATKVAAKVLEKMFPETKIVYSKAETVSMFRNKFDIVKCREINDFHHAHDAYLNIVVGNVYNTKFTNNPWNFIKEKRDNPKIADTYNYYKVFDYDVKRNNITAWEKGKTIITVKDMLKRNTPIYTRQAACKKGELFNQTIMKKGLGQHPLKKEGPFSNISKYGGYNKVSAAYYTLIEYEEKGNKIRSLETIPLYLVKDIQKDQDVLKSYLTDLLGKKEFKILVPKIKINSLLKINGFPCHITGKTNDSFLLRPAVQFCCSNNEVLYFKKIIRFSEIRSQREKIGKTISPYEDLSFRSYIKENLWKKTKNDEIGEKEFYDLLQKKNLEIYDMLLTKHKDTIYKKRPNSATIDILVKGKEKFKSLIIENQFEVILEILKLFSATRNVSDLQHIGGSKYSGVAKIGNKISSLDNCILIYQSITGIFEKRIDLLKV

SEQ ID NO: 15 - protein, 1334 aa, Listeria monocytogenes
MKNPYTIGLDIGTNSVGWAVLTNQYDLVKRKMKVAGNSDKKQIKKNFWGVRLFDDGQTAVDRRMNRTARRRIERRRNRISYLQEIFAVEMANIDANFFCRLNDSFYVDSEKRNSRHPFFATIEEEVAYHDNYRTIYHLREKLVNSSEKADLRLVYLALAHIIKYRGNFLIEGALDTKNTSVDEVYKQFIETYNQVFMSNIEEGALAKVEENIEVANILAGKFTRREKFERILQLYPGEKSTGMFAQFISLIVGSKGNFQKVFDLIEKTDIECAKDSYEEDLETLLAIIGDEYAELFVAAKNTYNAVVLSSIITVTDTETNAKLSASMIERFDAHEKDLVELKAFIKLNLPKQYEEIFSNAAIDGYAGYIDGKTKQVDFYKYLKTILENIEGSDYFIAKIEEENFLRKQRTFDNGAIPHQLHLEELEAIIHQQAKYYPFLKEDYDKIKSLVTFRIPYFVGPLANGQSEFAWLTRKADGEIRPWNIEEKVDFGKSAVDFIEKMTNKDTYLPKENVLPKHSLCYQKYMVYNELTKIRYIDDQGKTNYFSGREKQQVFNDLFKQKRKVKKKDLELFLRNINHIESPTIEGLEDSFNASYATYHDLLKVGMKQEILDNPLNTEMLEDIVKILTVFEDKPMIKEQLQQFSDVLDGGVLKKLERRHYTGWGRLSAKLLVGIREKQSHLTILDYLMNDDGLNRNLMQLINDSNLSFKSIIEKEQVSTTDKDLQSIVAELAGSPAIKKGILQSLKIVDELVSIMGYPPQTIVVEMARENQTTGKGKNNSKPRYKSLEKAIKEFGSQILKEHPTDNQELKNNRLYLYYLQNGKDMYTGQELDIHNLSNYDIDHIVPQSFITDNSIDNLVLTSSAGNREKGGDVPPLEIVRKRKVFWEKLYQGNLMSKRKFDYLTKAERGGLTEADKARFIHRQLVETRQITKNVANILYQRFNKETDNHGNTMEQVRIVTLKSALVSQFRKQFQLYKVREVNGYHHAHDAYLNGVVANTLLKVYPQLEPEFVYGEYHQFDWFKANKATAKKQFYTNIMLFFAQKERIIDENGEILWDKKYLETIKKVLDYRQMNIVKKTEIQKGEFSKATIKPKGNSSKLIPRKENWDPMKYGGLDSPNMAYAVIIEHAKGKKKIVIEKKLIQINIMERKMFEKDEEAFLEEKGYRHPKVLTKLPKYTLYECEKGRRRMLASANEAQKGNQLVLSNHLVSLLYHAKNCEASDGKSLKYIEAHRETFSELLAQVSEFATRYTLADANLSKINNLFEQNKEGDIKAIAQSFVDLMAFNAMGAPASFKFFEATIDRKRYTNLKELLSSTIIYQSITGLYESRKRLDD

SEQ ID NO: 16 - protein, 1236 aa, Mycoplasma mobile
MYFYKNKENKLNKKVVLGLDLGIASVGWCLTDISQKEDNKFPIILHGVRLFETVDDSDDKLLNETRRKKRGQRRRNRRLFTRKRDFIKYLIDNNIIELEFDKNPKILVRNFIEKYINPFSKNLELKYKSVTNLPIGFHNLRKAAINEKYKLDKSELIVLLYFYLSLRGAFFDNPEDTKSKEMNKNEIEIFDKNESIKNAEFPIDKIIEFYKISGKIRSTINLKFGHQDYLKEIKQVFEKQNIDFMNYEKFAMEEKSFFSRIRNYSEGPGNEKSFSKYGLYANENGNPELIINEKGQKIYTKIFKTLWESKIGKCSYDKKLYRAPKNSFSAKVFDITNKLTDWKHKNEYISERLKRKILLSRFLNKDSKSAVEKILKEENIKFENLSEIAYNKDDNKINLPIINAYHSLTTIFKKHLINFENYLISNENDLSKLMSFYKQQSEKLFVPNEKGSYEINQNNNVLHIFDAISNILNKFSTIQDRIRILEGYFEFSNLKKDVKSSEIYSEIAKLREFSGTSSLSFGAYYKFIPNLISEGSKNYSTISYEEKALQNQKNNFSHSNLFEKTWVEDLIASPTVKRSLRQTMNLLKEIFKYSEKNNLEIEKIVVEVTRSSNNKHERKKIEGINKYRKEKYEELKKVYDLPNENTTLLKKLWLLRQQQGYDAYSLRKIEANDVINKPWNYDIDHIVPRSISFDDSFSNLVIVNKLDNAKKSNDLSAKQFIEKIYGIEKLKEAKENWGNWYLRNANGKAFNDKGKFIKLYTIDNLDEFDNSDFINRNLSDTSYITNALVNHLTFSNSKYKYSVVSVNGKQTSNLRNQIAFVGIKNNKETEREWKRPEGFKSINSNDFLIREEGKNDVKDDVLIKDRSFNGHHAEDAYFITIISQYFRSFKRIERLNVNYRKETRELDDLEKNNIKFKEKASFDNFLLINALDELNEKLNQMRFSRMVITKKNTQLFNETLYSGKYDKGKNTIKKVEKLNLLDNRTDKIKKIEEFFDEDKLKENELTKLHIFNHDKNLYETLKIIWNEVKIEIKNKNLNEKNYFKYFVNKKLQEGKISFNEWVPILDNDFKIIRKIRYIKFSSEEKETDEIIFSQSNFLKIDQRQNFSFHNTLYWVQIWVYKNQKDQYCFISIDARNSKFEKDEIKINYEKLKTQKEKLQIINEEPILKINKGDLFENEEKELFYIVGRDEKPQKLEIKYILGKKIKDQKQIQKPVKKYFPNWKKVNLTYMGEIFKK

SEQ ID NO: 17 - protein, 1372 aa, Legionella pneumophila
MESSQILSPIGIDLGGKFTGVCLSHLEAFAELPNHANTKYSVILIDHNNFQLSQAQRRATRHRVRNKKRNQFVKRVALQLFQHILSRDLNAKEETALCHYLNNRGYTYVDTDLDEYIKDETTINLLKELLPSESEHNFIDWFLQKMQSSEFRKILVSKVEEKKDDKELKNAVKNIKNFITGFEKNSVEGHRHRKVYFENIKSDITKDNQLDSIKKKIPSVCLSNLLGHLSNLQWKNLHRYLAKNPKQFDEQTFGNEFLRMLKNFRHLKGSQESLAVRNLIQQLEQSQDYISILEKTPPEITIPPYEARTNTGMEKDQSLLLNPEKLNNLYPNWRNLIPGIIDAHPFLEKDLEHTKLRDRKRIISPSKQDEKRDSYILQRYLDLNKKIDKFKIKKQLSFLGQGKQLPANLIETQKEMETHFNSSLVSVLIQIASAYNKEREDAAQGIWFDNAFSLCELSNINPPRKQKILPLLVGAILSEDFINNKDKWAKFKIFWNTHKIGRTSLKSKCKEIEEARKNSGNAFKIDYEEALNHPEHSNNKALIKIIQTIPDIIQAIQSHLGHNDSQALIYHNPFSLSQLYTILETKRDGFHKNCVAVTCENYWRSQKTEIDPEISYASRLPADSVRPFDGVLARMMQRLAYEIAMAKWEQIKHIPDNSSLLIPIYLEQNRFEFEESFKKIKGSSSDKTLEQAIEKQNIQWEEKFQRIINASMNICPYKGASIGGQGEIDHIYPRSLSKKHFGVIFNSEVNLIYCSSQGNREKKEEHYLLEHLSPLYLKHQFGTDNVSDIKNFISQNVANIKKYISFHLLTPEQQKAARHALFLDYDDEAFKTITKFLMSQQKARVNGTQKFLGKQIMEFLSTLADSKQLQLEFSIKQITAEEVHDHRELLSKQEPKLVKSRQQSFPSHAIDATLTMSIGLKEFPQFSQELDNSWFINHLMPDEVHLNPVRSKEKYNKPNISSTPLFKDSLYAERFIPVWVKGETFAIGFSEKDLFEIKPSNKEKLFTLLKTYSTKNPGESLQELQAKSKAKWLYFPINKTLALEFLHHYFHKEIVTPDDTTVCHFINSLRYYTKKESITVKILKEPMPVLSVKFESSKKNVLGSFKHTIALPATKDWERLFNHPNFLALKANPAPNPKEFNEFIRKYFLSDNNPNSDIPNNGHNIKPQKHKAVRKVFSLPVIPGNAGTMMRIRRKDNKGQPLYQLQTIDDTPSMGIQINEDRLVKQEVLMDAYKTRNLSTIDGINNSEGQAYATFDNWLTLPVSTFKPEIIKLEMKPHSKTRRYIRITQSLADFIKTIDEALMIKPSDSIDDPLNMPNEIVCKNKLFGNELKPRDGKMKIVSTGKIVTYEFESDSTPQWIQTLYVTQLKKQP

SEQ ID NO: 18 - protein, 1122 aa, Streptococcus thermophilus
MSDLVLGLDIGIGSVGVGILNKVTGEIIHKNSRIFPAAQAENNLVRRTNRQGRRLTRRKKHRIVRLNRLFEESGLITDFTKISINLNPYQLRVKGLTDELSNEELFIALKNMVKHRGISYLDDASDDGNSSVGDYAQIVKENSKQLETKTPGQIQLERYQTYGQLRGDFTVEKDGKKHRLINVFPTSAYRSEALRILQTQQEFNSQITDEFINRYLEILTGKRKYYHGPGNEKSRTDYGRYRTNGETLDNIFGILIGKCTFYPDEFRAAKASYTAQEFNLLNDLNNLTVPTETKKLSKEQKNQIINYVKNEKVMGPAKLFKYIAKLLSCDVADIKGHRIDKSGKAEIHTFEAYRKMKTLETLDIEQMDRETLDKLAYVLTLNTEREGIQEALEHEFADGSFSQKQVDELVQFRKANSSIFGKGWHNFSVKLMMELIPELYETSEEQMTILTRLGKQKTTSSSNKTKYIDEKLLTEEIYNPVVAKSVRQAIKIVNAAIKEYGDFDNIVIEMARETNEDDEKKAIQKIQKANKDEKDAAMLKAANQYNGKAELPHSVFHGHKQLATKIRLWHQQGERCLYTGKTISIHDLINNPNQFEVDHILPLSITFDDSLANKVLVYATANQEKGQRTPYQALDSMDDAWSFRELKAFVRESKTLSNKKKEYLLTEEDISKFDVRKKFIERNLVDTRYASRVVLNALQEHFRAHKIDTKVSVVRGQFTSQLRRHWGIEKTRDTYHHHAVDALIIAASSQLNLWKKQKNTLVSYSEEQLLDIETGELISDDEYKESVFKAPYQHFVDTLKSKEFEDSILFSYQVDSKFNRKISDATIYATRQAKVGKDKKDETYVLGKIKDIYTQDGYDAFMKIYKKDKSKFLMYRHDPQTFEKVIEPILENYPNKEMNEKGKEVPCNPFLKYKEEHGYIRKYSKKGNGPEIKSLKYYDSKLLGNPIDITPENSKNKVVLQSLKPWRTDVYFNKNTGKYEILGLKYADLQFEKKTGTYKISQEKYNGIMKEEGVDSDSEFKFTLYKNDLLLVKDTETKEQQLFRFLSRTMPNVKYYVELKPYSKDKFEKNESLIEILGSADKSGRCIKGLGKSNISIYKVRTDVLGNQHIIKNEGDKPKLDF

SEQ ID NO: 19 - protein, 1128 aa, Streptococcus thermophilus
MSDLVLGLDIGIGSVGVGILNKVTGEIIHKNSRIFPAAQAENNLVRRTNRQGRRLTRRKKHRIVRLNRLFEESGLITDFTKISINLNPYQLRVKGLTDELSNEELFIALKNMVKHRGISYLDDASDDGNSSVGDYAQIVKENSKQLETKTPGQIQLERYQTYGQLRGDFTVEKDGKKHRLINVFPTSAYRSEALRILQTQQEFNPQITDEFINRYLEILTGKRKYYHGPGNEKSRTDYGRYRTSGETLDNIFGILIGKCTFYPEEFRAAKASYTAQEFNLLNDLNNLTVPTETKKLSKEQKNQIINYVKNEKAMGPAKLFKYIAKLLSCDVADIKGYRIDKSGKAEIHTFEAYRKMKTLETLDIEQMDRETLDKLAYVLTLNTEREGIQEALEHEFADGSFSQKQVDELVQFRKANSSIFGKGWHNFSVKLMMELIPELYETSEEQMTILTRLGKQKRLRLQIKQNISNKTKYIDEKLLTEEIYNPVVAKSVRQAIKIVNAAIKEYGDFDNIVIEMARETNEDDEKKAIQKIQKANKDEKDAAMLKAANQYNGKAELPHSVFHGHKQLATKIRLWHQQGERCLYTGKTISIHDLINNPNQFEVDHILPLSITFDDSLANKVLVYATANQEKGQRTPYQALDSMDDAWSFRELKAFVRESKTLSNKKKEYLLTEEDISKFDVRKKFIERNLVDTRYASRVVLNALQEHFRAHKIDTKVSVVRGQFTSQLRRHWGIEKTRDTYHHHAVDALIIAASSQLNLWKKQKNTLVSYSEEQLLDIETGELISDDEYKESVFKAPYQHFVDTLKSKEFEDSILFSYQVDSKFNRKISDATIYATRQAKVGKDKKDETYVLGKIKDIYTQDGYDAFMKIYKKDKSKFLMYRHDPQTFEKVIEPILENYPNKQMNEKGKEVPCNPFLKYKEEHGYIRKYSKKGNGPEIKSLKYYDSKLLGNPIDITPENSKNKVVLQSLKPWRTDVYFNKATGKYEILGLKYADLQFEKGTGTYKISQEKYNDIKKKEGVDSDSEFKFTLYKNDLLLVKDTETKEQQLFRFLSRTLPKQKHYVELKPYDKQKFEGGEALIKVLGNVANGGQCIKGLAKSNISIYKVRTDVLGNQHIIKNEGDKPKLDF

SEQ ID NO: 20 - protein, 1123 aa, Francisella tularensis
MNVKILPIAIDLDVKNTGVFSAFYQKGTSLEKLDNKNGKVYELSKDSYTLLMNNRTARRHKRRGIDRKQLVKRLFKLVWTEQLNLEWDKDTQQAISFLFNRRGFSFITDGYSTEYLNIVPEQVKAILMDIFDDYNGEDDLDSYLKLATEQESKISEIYNKLMQKILEFKLRKLCTDIKDDKVSTKTLKEITSYEFELLADYLANYSESLKTQKFSYTDKQGNLKELSYYHHDKYNIQEFLKRHATINDEILGTLLTDDFDIWNFNFEKFDFDKNEEKLQNQEDKDHTQAHLHHFVFVVNKIKSEMASGGRHRSQYFQEITNVLDENNHQEGYLKNFCENLHNKKYSNLSVKNLVNLVGNLSNLELKPLRKYFNDKIHAKADHWDEQKFTETYCHWILGEWRVGVKDQDKKDGAKYSYKDLCNELKQKVTKAGLIDFLLELDPCRTIPPYLDNNNRKPPKCQSLILNPKFLDNQYPNWQQYLQELKKLQSIQDYLDSFETDLKDLKSSKDQPYFVEYKSSNQQMASGQRDYKDLDARILQFIFDRVKASDELLLNEIYFQAKKLKQKASSELEKLESSKKLDEVIANSQLSQILKSQHTNGIFEQGTFLHLVCKYYKQRQRARDSRLYIMPEYRYDKKLDKYNNTGRFDDNNQLLTYCNHKPRQKRYQLLNDLAGVLQVSRNQLLSSVEEWFQQAQRVGEISKSQDEQIFEWLKSFKIASYCKAAVEMQKQYRGTLKNAIQTAIFRQSENINKNKNTGNQQQALSENSKDVKSLTADEKKLLKLIENIAKASQKIGESLGLNDKQIKKFNSIYSFAQIQQIAFAKRKGNANTCAVCSADNAHRMQQIKITELVEDNKDNIILSAKAQRLPAIPTRIVDGAVKKMATILAKNIVDDNWQNIKQVLSAKHQLHIPIITESNAFEFEPALADVKGKSLKDRRKKALERISPENIFKDKNNRIKEFAKGISAYSGANLTDGDFDGAKEELDHIIPRSHKKYGTLNDEANLICVTRDDNKNIFAIDTSKWFEIETPSDLRDIGVATIQYKIDNNSRPKVRVKLDYVIDDDSKINYFMNHSLLKSRYPDKVLEILKQSTIIEFESSGFNKTIKEMLGMTLAGIYNETSNN

SEQ ID NO: 21 - protein, 1436 aa, Bacteroides fragilis
MKRILGLDLGTNSIGWALVNEAENKDERSSIVKLGVRVNPLTVDELTNFEKGKSITTNADRTLKRGMRRNLQRYKLRRETLTEVLKEHKLITEDTILSENGNRTTFETYRLRAKAVTEEISLEEFARVLLMINKKRGYKSSRKAKGVEEGTLIDGMDIARELYNNNLTPGELCLQLLDAGKKFLPDFYRSDLQNELDRIWEKQKEYYPEILTDVLKEELRGKKRDAVWAICAKYFVWKENYTEWNKEKGKTEQQEREHKLEGIYSKRKRDEAKRENLQWRVNGLKEKLSLEQLVIVFQEMNTQINNSSGYLGAISDRSKELYFNKQTVGQYQMEMLDKNPNASLRNMVFYRQDYLDEFNMLWEKQAVYHKELTEELKKEIRDIIIFYQRRLKSQKGLIGFCEFESRQIEVDIDGKKKIKTVGNRVISRSSPLFQEFKIWQILNNIEVTVVGKKRKRRKLKENYSALFEELNDAEQLELNGSRRLCQEEKELLAQELFIRDKMTKSEVLKLLFDNPQELDLNFKTIDGNKTGYALFQAYSKMIEMSGHEPVDFKKPVEKVVEYIKAVFDLLNWNTDILGFNSNEELDNQPYYKLWHLLYSFEGDNTPTGNGRLIQKMTELYGFEKEYATILANVSFQDDYGSLSAKAIHKILPHLKEGNRYDVACVYAGYRHSESSLTREEIANKVLKDRLMLLPKNSLHNPVVEKILNQMVNVINVIIDIYGKPDEIRVELARELKKNAKEREELTKSIAQTTKAHEEYKTLLQTEFGLTNVSRTDILRYKLYKELESCGYKTLYSNTYISREKLFSKEFDIEHIIPQARLFDDSFSNKTLEARSVNIEKGNKTAYDFVKEKFGESGADNSLEHYLNNIEDLFKSGKISKTKYNKLKMAEQDIPDGFIERDLRNTQYIAKKALSMLNEISHRVVATSGSVTDKLREDWQLIDVMKELNWEKYKALGLVEYFEDRDGRQIGRIKDWTKRNDHRHHAMDALTVAFTKDVFIQYFNNKNASLDPNANEHAIKNKYFQNGRAIAPMPLREFRAEAKKHLENTLISIKAKNKVITGNINKTRKKGGVNKNMQQTPRGQLHLETIYGSGKQYLTKEEKVNASFDMRKIGTVSKSAYRDALLKRLYENDNDPKKAFAGKNSLDKQPIWLDKEQMRKVPEKVKIVTLEAIYTIRKEISPDLKVDKVIDVGVRKILIDRLNEYGNDAKKAFSNLDKNPIWLNKEKGISIKRVTISGISNAQSLHVKKDKDGKPILDENGRNIPVDFVNTGNNHHVAVYYRPVIDKRGQLVVDEAGNPKYELEEVVVSFFEAVTRANLGLPIIDKDYKTTEGWQFLFSMKQNEYFVFPNEKTGFNPKEIDLLDVENYGLISPNLFRVQKFSLKNYVFRHHLETTIKDTSSILRGITWIDFRSSKGLDTIVKVRVNHIGQIVSVGEY

SEQ ID NO: 22 - protein, 1314 aa, Mycoplasma synoviae
MLRLYCANNLVLNNVQNLWKYLLLLIFDKKIIFLFKIKVILIRRYMENNNKEKIVIGFDLGVASVGWSIVNAETKEVIDLGVRLFSEPEKADYRRAKRTTRRLLRRKKFKREKFHKLILKNAEIFGLQSRNEILNVYKDQSSKYRNILKLKINALKEEIKPSELVWILRDYLQNRGYFYKNEKLTDEFVSNSFPSKKLHEHYEKYGFFRGSVKLDNKLDNKKDKAKEKDEEEESDAKKESEELIFSNKQWINEIVKVFENQSYLTESFKEEYLKLFNYVRPFNKGPGSKNSRTAYGVFSTDIDPETNKFKDYSNIWDKTIGKCSLFEEEIRAPKNLPSALIFNLQNEICTIKNEFTEFKNWWLNAEQKSEILKFVFTELFNWKDKKYSDKKFNKNLQDKIKKYLLNFALENFNLNEEILKNRDLENDTVLGLKGVKYYEKSNATADAALEFSSLKPLYVFIKFLKEKKLDLNYLLGLENTEILYFLDSIYLAISYSSDLKERNEWFKKLLKELYPKIKNNNLEIIENVEDIFEITDQEKFESFSKTHSLSREAFNHIIPLLLSNNEGKNYESLKHSNEELKKRTEKAELKAQQNQKYLKDNFLKEALVPLSVKTSVLQAIKIFNQIIKNFGKKYEISQVVIEMARELTKPNLEKLLNNATNSNIKILKEKLDQTEKFDDFTKKKFIDKIENSVVFRNKLFLWFEQDRKDPYTQLDIKINEIEDETEIDHVIPYSKSADDSWFNKLLVKKSTNQLKKNKTVWEYYQNESDPEAKWNKFVAWAKRIYLVQKSDKESKDNSEKNSIFKNKKPNLKFKNITKKLFDPYKDLGFLARNLNDTRYATKVFRDQLNNYSKHHSKDDENKLFKVVCMNGSITSFLRKSMWRKNEEQVYRFNFWKKDRDQFFHHAVDASIIAIFSLLTKTLYNKLRVYESYDVQRREDGVYLINKETGEVKKADKDYWKDQHNFLKIRENAIEIKNVLNNVDFQNQVRYSRKANTKLNTQLFNETLYGVKEFENNFYKLEKVNLFSRKDLRKFILEDLNEESEKNKKNENGSRKRILTEKYIVDEILQILENEEFKDSKSDINALNKYMDSLPSKFSEFFSQDFINKCKKENSLILTFDAIKHNDPKKVIKIKNLKFFREDATLKNKQAVHKDSKNQIKSFYESYKCVGFIWLKNKNDLEESIFVPINSRVIHFGDKDKDIFDFDSYNKEKLLNEINLKRPENKKFNSINEIEFVKFVKPGALLLNFENQQIYYISTLESSSLRAKIKLLNKMDKGKAVSMKKITNPDEYKIIEHVNPLGINLNWTKKLENNN

SEQ ID NO: 23 - protein, 1368 aa, Streptococcus pyogenes
MDKKYSIGLDIGTNSVGWAVITDDYKVPSKKFKVLGNTDRHSIKKNLIGALLFDSGETAEATRLKRTARRRYTRRKNRICYLQEIFSNEMAKVDDSFFHRLEESFLVEEDKKHERHPIFGNIVDEVAYHEKYPTIYHLRKKLVDSTDKADLRLIYLALAHMIKFRGHFLIEGDLNPDNSDVDKLFIQLVQTYNQLFEENPINASGVDAKAILSARLSKSRRLENLIAQLPGEKKNGLFGNLIALSLGLTPNFKSNFDLAEDAKLQLSKDTYDDDLDNLLAQIGDQYADLFLAAKNLSDAILLSDILRLNSEITKAPLSASMIKRYDEHHQDLTLLKALVRQQLPEKYKEIFFDQSKNGYAGYIDGGASQEEFYKFIKPILEKMDGTEELLAKLNREDLLRKQRTFDNGSIPHQIHLGELHAILRRQEDFYPFLKDNREKIEKILTFRIPYYVGPLARGNSRFAWMTRKSEETITPWNFEEVVDKGASAQSFIERMTNFDKNLPNEKVLPKHSLLYEYFTVYNELTKVKYVTEGMRKPAFLSGEQKKAIVDLLFKTNRKVTVKQLKEDYFKKIECFDSVEISGVEDRFNASLGTYHDLLKIIKDKDFLDNEENEDILEDIVLTLTLFEDREMIEERLKTYAHLFDDKVMKQLKRRRYTGWGRLSRKLINGIRDKQSGKTILDFLKSDGFANRNFMQLIHDDSLTFKEDIQKAQVSGQGDSLHEHIANLAGSPAIKKGILQTVKVVDELVKVMGRHKPENIVIEMARENQTTQKGQKNSRERMKRIEEGIKELGSQILKEHPVENTQLQNEKLYLYYLQNGRDMYVDQELDINRLSDYDVDHIVPQSFIKDDSIDNKVLTRSDKNRGKSNNVPSEEVVKKMKNYWRQLLNAKLITQRKFDNLTKAERGGLSELDKAGFIKRQLVETRQITKHVAQILDSRMNTKYDENDKLIREVKVITLKSKLVSDFRKDFQFYKVREINNYHHAHDAYLNAVVGTALIKKYPKLESEFVYGDYKVYDVRKMIAKSEQEIGKATAKYFFYSNIMNFFKTEITLANGEIRKRPLIETNGETGEIVWDKGRDFATVRKVLSMPQVNIVKKTEVQTGGFSKESILPKRNSDKLIARKKDWDPKKYGGFDSPTVAYSVLVVAKVEKGKSKKLKSVKELLGITIMERSSFEKNPIDFLEAKGYKEVRKDLIVKLPKYSLFELENGRKRMLASAGELQKGNELALPSKYVNFLYLASHYEKLKGSPEDNEQKQLFVEQHKHYLDEIIEQISEFSKRVILADANLDKVLSAYNKHRDKPIREQAENIIHLFTLTNLGAPAAFKYFDTTIDRKRYTSTKEVLDATFIHQSITGLYETRIDLSQLGGD

SEQ ID NO: 24 - protein, 1368 aa, Streptococcus pyogenes
MDKKYSIGLDIGTNSVGWAVITDDYKVPSKKFKVLGNTDRHSIKKNLIGALLFDSGETAEATRLKRTARRRYTRRKNRICYLQEIFSNEMAKVDDSFFHRLEESFLVEEDKKHERHPIFGNIVDEVAYHEKYPTIYHLRKKLVDSTDKADLRLIYLALAHMIKFRGHFLIEGDLNPDNSDVDKLFIQLVQTYNQLFEENPINASGVDAKAILSARLSKSRRLENLIAQLPGEKKNGLFGNLIALSLGLTPNFKSNFDLAEDAKLQLSKDTYDDDLDNLLAQIGDQYADLFLAAKNLSDAILLSDILRVNTEITKAPLSASMIKRYDEHHQDLTLLKALVRQQLPEKYKEIFFDQSKNGYAGYIDGGASQEEFYKFIKPILEKMDGTEELLVKLNREDLLRKQRTFDNGSIPHQIHLGELHAILRRQEDFYPFLKDNREKIEKILTFRIPYYVGPLARGNSRFAWMTRKSEETITPWNFEEVVDKGASAQSFIERMTNFDKNLPNEKVLPKHSLLYEYFTVYNELTKVKYVTEGMRKPAFLSGEQKKAIVDLLFKTNRKVTVKQLKEDYFKKIECFDSVEISGVEDRFNASLGTYHDLLKIIKDKDFLDNEENEDILEDIVLTLTLFEDREMIEERLKTYAHLFDDKVMKQLKRRRYTGWGRLSRKLINGIRDKQSGKTILDFLKSDGFANRNFMQLIHDDSLTFKEDIQKAQVSGQGDSLHEHIANLAGSPAIKKGILQTVKVVDELVKVMGRHKPENIVIEMARENQTTQKGQKNSRERMKRIEEGIKELGSQILKEHPVENTQLQNEKLYLYYLQNGRDMYVDQELDINRLSDYDVDHIVPQSFLKDDSIDNKVLTRSDKNRGKSDNVPSEEVVKKMKNYWRQLLNAKLITQRKFDNLTKAERGGLSELDKAGFIKRQLVETRQITKHVAQILDSRMNTKYDENDKLIREVKVITLKSKLVSDFRKDFQFYKVREINNYHHAHDAYLNAVVGTALIKKYPKLESEFVYGDYKVYDVRKMIAKSEQEIGKATAKYFFYSNIMNFFKTEITLANGEIRKRPLIETNGETGEIVWDKGRDFATVRKVLSMPQVNIVKKTEVQTGGFSKESILPKRNSDKLIARKKDWDPKKYGGFDSPTVAYSVLVVAKVEKGKSKKLKSVKELLGITIMERSSFEKNPIDFLEAKGYKEVKKDLIIKLPKYSLFELENGRKRMLASAGELQKGNELALPSKYVNFLYLASHYEKLKGSPEDNEQKQLFVEQHKHYLDEIIEQISEFSKRVILADANLDKVLSAYNKHRDKPIREQAENIIHLFTLTNLGAPAAFKYFDTTIDRKRYTSTKEVLDATLIHQSITGLYETRIDLSQLGGD

SEQ ID NO: 25 - protein, 1370 aa, Streptococcus agalactiae; identical to SEQ ID NO: 5

SEQ ID NO: 26 - protein, 1173 aa, Rhodospirillum rubrum
MRPIEPWILGLDIGTDSLGWAVFSCEEKGPPTAKELLGGGVRLFDSGRDAKDHTSRQAERGAFRRARRQTRTWPWRRDRLIALFQAAGLTPPAAETRQIALALRREAVSRPLAPDALWAALLHLAHHRGFRSNRIDKRERAAAKALAKAKPAKATAKATAPAKEADDEAGFWEGAEAALRQRMAASGAPTVGALLADDLDRGQPVRMRYNQSDRDGVVAPTRALIAEELAEIVARQSSAYPGLDWPAVTRLVLDQRPLRSKGAGPCAFLPGEDRALRALPTVQDFIIRQTLANLRLPSTSADEPRPLTDEEHAKALALLSTARFVEWPALRRALGLKRGVKFTAETERNGAKQAARGTAGNLTEAILAPLIPGWSGWDLDRKDRVFSDLWAARQDRSALLALIGDPRGPTRVTEDETAEAVADAIQIVLPTGRASLSAKAARAIAQAMAPGIGYDEAVTLALGLHHSHRPRQERLARLPYYAAALPDVGLDGDPVGPPPAEDDGAAAEAYYGRIGNISVHIALNETRKIVNALLHRHGPILRLVMVETTRELKAGADERKRMIAEQAERERENAEIDVELRKSDRWMANARERRQRVRLARRQNNLCPYTSTPIGHADLLGDAYDIDHVIPLARGGRDSLDNMVLCQSDANKTKGDKTPWEAFHDKPGWIAQRDDFLARLDPQTAKALAWRFADDAGERVARKSAEDEDQGFLPRQLTDTGYIARVALRYLSLVTNEPNAVVATNGRLTGLLRLAWDITPGPAPRDLLPTPRDALRDDTAARRFLDGLTPPPLAKAVEGAVQARLAALGRSRVADAGLADALGLTLASLGGGGKNRADHRHHFIDAAMIAVTTRGLINQINQASGAGRILDLRKWPRTNFEPPYPTFRAEVMKQWDHIHPSIRPAHRDGGSLHAATVFGVRNRPDARVLVQRKPVEKLFLDANAKPLPADKIAEIIDGFASPRMAKRFKALLARYQAAHPEVPPALAALAVARDPAFGPRGMTANTVIAGRSDGDGEDAGLITPFRANPKAAVRTMGNAVYEVWEIQVKGRPRWTHRVLTRFDRTQPAPPPPPENARLVMRLRRGDLVYWPLESGDRLFLVKKMAVDGRLALWPARLATGKATALYAQLSCPNINLNGDQGYCVQSAEGIRKEKIRTTSCTALGRLRLSKKAT

SEQ ID NO: 27 - protein, 997 aa, Maritimibacter alkaliphilus
MKVLVDAGLMPSDPAAAKALETLDPYELRATGLDVMLPLTHLGRAVFHLNQRRGFKSNRKTDRGDNESGKIKDATKRLTWAMQEAGARTYGEFLHMRRARASDPRQVPSVRTRLSVASRGGPDSKEEAGYDFYPERAHLEDEFHALWSAQAAFHPDLTCELRDVVFEKIFYQRPLKEPKVGLCLFTAEERLPKAHPLTGRRVLYETVNQLRVTADGRTTRPLTLEERDMIVYALDNKKPVKSLSSMHLKLVALGKLVKLKDGERFTLESGVRDAIACDPIRATMGHPDGFGPAWSRLDWQAQWALIEKLRQVQSDDDFASLVAWLGATHNLSEDHAKRVANLHLPEGYGRLGLTATEAILCNLKAEVCTYSQAVERWGKHHSNQRTGECLEALPYYGEVLDRHVIPGTYNEDDDDVTRYGRITNPTVHIGLNQLRRLVNRIIATYGKPDQIVVELARELKQSEAQKSEALKKIRDTTADAIRRGRQLEEIGQKNTGANRLLLRLWEDLGPAVGPRCCPYTGKPISVTMLFDGACDVDHILPYSRTLDDSFANRTICLREANRQKGDRTPWEAWGGSDQWDAIEANLKDLPENKRKRFAPDAMERFEGERDFLDRALVDTQYLARISRAYLDTLFTEGGHVWVVPGRMTEMLRRHWGLNALLSDKDRGAGKVKNRTDHRHHAIDAAVIAATDHSLVNRISKAAGQGESAGQSAELIARDTPEPWEGFRNDISAQIARIVVSHRADHGRIDVEGRKHGKDSTAGRLHNDTAYGIVDDHTVVSRTPLLSLKPGDIEVTTKGKNIRDTQLQKALSVATTGKDGKGFEEALRNFAEKEGPYQGIRRVRLIETLQSSARVEVGSDEDGQPLKAYKGDSNHCYDLWKLPDGKVVPHVVSTYEAHAGTDKRPHPAAKRILRVFKKDMVAIEQDDQTAIFYVQKLDRANGLFLAPHLEANADARHRNPNDAFKFLQMGAGSVVRNKLRRVYVDEIGRIKDPGPPKH

SEQ ID NO: 28 - protein, 1027 aa, Blastopirellula marina
MFSESGDQPSLVDCGVRIFPEGVERDQQGGEKSKSQSRRVARGIRRQVRRRAQRLRHLKHALITTGLFPADVVDQQEVLASNPYELRSRALSEKLEPYEIGRILLHLAKRRGFLSNRTTDRSGGNELKGILAEMTQLQGEIAAHGCQTLGQYLHQLGDDGETFAQRLRGRHTLRAMYEDEFEKIWERQASYYPALLTEELRGGEEGKQSYPLVPTARRKSESLLKRFGLHGLLFFQRKMYWPKSVIGRCDLEPKEKRCPKADRLAQRFRILQEVNNLRLISPADRKEYTFAEFVGAGADKKLVDYLCEAKERTFPQIRKKFKLPETISFNYERGERSKLQGHETDAHFNGKKGLGKRRWSEIAEDVKDHIIQIVLEEDREDVALRKLTQDCSLTVEEAHKAMALHLPAGYSQYSRVAISRLLPHLELGKLLMGNDASDSAMHAAGYLRPDEREVRQYDLLPEPPDIPNPLVRQALYEVRKVINAIIREYGALGTIRVELAREAKKSAEQRTQIRIANAKRERENAAIAKTLQEMSPAIRPTRRNIQRYLLWKDQGGVCIYTGKVISQAQLFDSGEVDVDHILPRWRSLDDSMANKVIAHRSANNEKGDRTPWEWLGHDKPRFDELLLRAQRLPYGKRQRFIQKEVELTNFVERQLRDTTYVSRLVVQYLKGLGVPITTVKGPMTAELRHHWGLNALLNEDGSQKKNRSDHRHHAIDAIVIGLTDAKRLHALANARGKDLQPPWSEFRSDVATALGRMAVSHRVRRRIQGALHEETIYGPTQKAAQPTSTDQRPWAKDWIEDSQIVVRRKSVSDLTNTKHLAKIRDVTIRKILEDHLRRQKVDPTKPGVIPKDAFAGSNAPQMPSGVPIKKVRLVERGETWRKIGSGEASKFIKPGSNHHISYFAISRKGRESWKAHVTIMLDAACIAKESINNGKIVNRSIGDQGRFLMSLSIGEMFEITNNGGEILLCVVRKIDQSGRIYYKIHDDARESMDLKKDNLYMSPSKMQQFDARKVTVTPLGKIRNAND

SEQ ID NO: 29 - protein, 158 aa, Francisella tularensis
MIDFLLELDPCITIPPYLDNNNRKPPKCQSLILNPKFLDNQYPNWQQYLQELKKLQSIQDYLDSFETDLKDLKSSKDQPYFVEYKSSNQQMASGQRDYKDLDARILQFIFDRVKASDELLLSEIYFQAKKLKQKASSELEKLESSKKLDEVIANSQLS

SEQ ID NO: 30 - protein, 393 aa, Francisella tularensis
MNVKILPIAIDLDVKNTGVFSAFYQKGTSLEKLDNKNGKVYELSKDSYTLLMNNRTAQRHQRRGIDRKQLVKRLFKLVWTEQLNLEWDKDTQQAISFLFNRRGFSFITDGYSTEYLNIVPEQVKAILMDIFDDYNGEDDLDSYLKLATEQESKISEIYNKLMQKILEFKLRKLCTDIKDDKVSTKTLKEITSYEFELLADYLANYSESLKTQKFSYTDKQGNLKELSYYHHDKYNIQEFLKRHATINDEILDTLLTDDFDIWNFNFEKFDFDKNEEKLQSQEDKDHTQAYFHHFVFAVNKIKSEMASGGRHRSQYFQEITNVLDENNHQEGYLKNFCENLHNKKYSNLSVKNLVNLVGNLSNLELKPLRKYFNDKNLIIGMSKSLQKLIATGY

SEQ ID NO: 31 - protein, 1066 aa, Rhodopseudomonas palustris
MSERVVRRILGIDLGIASCGWGVVDISGAGGGIIATGVRCFDAPLIDKTGEPKSATRRTARGQRRIVRRRRQRMNGVRRLLCEFGLLPDPRPDALNQAMRRISTASAAAQVTPWTLRAAAHQRLLSNEELAVVLGHIARHRGFRSNAKNEAGANAADETSKMKKAMEATREGLAKYHAFGDMIANDPKFANRKRNRDKDYSHTAKRSDLEDEVRAILRAQLRFGSAAATETLAQTFADVAFFQRPLQDSEDRVGDCPFEPGQKRAARRAPSFELFRFLSRLANLKLAVGRSPERRLTAEEIALAAKGFGETKKTITFKSLREALDLDPNARFSGIGKDKEASLDVVARTGGAAYGTKTLKDALGDAPWRSLSRTPETLDRIAEILSFREDITSIRNGLEDLGLDSLVVEALMQAAANGDFKEFTRAGHISARAARNIIPGLREGLVYSEACARVGYDHAARLSVPLDQVGSPVTRKALSEALKQVRAVAREYGPIDYFHIELARSVGKSAEERKQLTDGIEARNVEKAKRRKQAEEHLGRAPSDDELLRYELAKEQNFKCIYSGDAIDPAGVAANDTRYQVDHILPWSRFGDDSYLNKTLCTARSNQNKRGRTPFEWFEADKTDVEWMEYVARVENLQEVKGRKKRNYSIKDAAAIEDKFKARNLTDTQWATRLLADELSRMFPPRECERAICGRADGGNDGLTIVEERRVFTRPGAITSKLRRAWGLEGLKKQDGKRVEDDRHHAVDALVLAATTESLLQRLTVEVQRREREGRPDDIFHCAEPWRGFRADVRRTVYGSETMPGIFVSRAERRRARGKAHDATIKQIREIEGERLVFERKPVEKLTDKDLEKIPIPKPYGQVSDPKRLRDELVESLRAWIAAGKPKDRPPLSPKGDVIRKVRIQTNDKVSVEINGGTVDRGDMARVDVFRKKNKKAVWEYYVVPIYPHQIVALNDPPDRAVIAYAEDKDWKEIDSSYEFLWSLFGLSYVEISKANGECIDGYFRGLHRGTGAASVCKHISLGKDATVSGIGLKTLASFKKFTIDRLGRKFEIPREVRTWRGEACT

SEQ ID NO: 32 - protein, 1149 aa, Lactobacillus salivarius
MERYHIGLDIGTSSIGWAVIGDDFKIKRKKGKNLIGVRLFKEGDTAAERRGFRTQRRRLNRRKWRLKLLEEIFDPYMAEVDKYFFARLKESNLSPKDSNKKYLGSLLFPDISDSNFYDKYPTIYHLRRDLMEKDKKFDLREIYLAIHHIVKYRGNFLEKVPAKNYKNSGASIGFLLEEVNDLYGNIIGNEDVAILDNDKFEDVEKIILNDEIRNIDKQKNVGRLLVKDKKEKNIVTAFSKAIFGYKFNLEDLLLIESDEKNKLTFNDENIDDIFNELSHSLNDNQMDLLTKTREIYFKFKLNMIVPTGYTISESMIEKYEMHKAHLKMYKEFINTLNAKDRKILKNAYSDYINNEKAKAANAQENFYKTVKKTIKENDSDTAKKIIGLIDEGNFMPKQRTGENGVIPHQLHQIELDRIIENQAKYYPWLAEENPVEKNRKFAKYKLDELVTFRVPYYVGPLIDKTESNKNEKETKFAWMVRKAKGTITPWNFENLVDRTESANRFIKRMTSKDTYIIGEDVLPASSLLYEKYKVLNELNNIKVNKKKLDVEQKQHVYLDLFTTRKNVTKDDLATSLNCDVESITGLTDNKKFNSSLSSYIDLKAILGNIVDDYSKNEDLEKIIEYSTIFEDGNIYKEKLSEISWLTDEQIEKLSNIHFKGWGRLSKKLLTQITNENGERIIDTLWNTSNNFIQVISDESIQAKLAEINGEYANKYNLEDILDEAYTSPQNKKAIRQVMKVVEDIEKAMKCEPTSIAIEFTREKRKSKLTNTRYKKISETYEKITDELISEYELGKLQSELDSKVNNMRDRYYLYFMQLGRDMYTGEKMNIDELHQKYDIDHILPQSFIKDDSLNNRVLTSKSVNIKEKSDKTAADLYAAKMGDFWRKLRKQGLMTEQKYKNLLTRTDSINKYTKQSFIKRQLVETSQVVKLAANILQDKYRNTKIIEIRARLNSDLRKKYELIKNREVNDYHHAIDGYLTTFVGQYLYKVYPKLRSYFVYDDFKKLDSNYLKHMDKFNFIWKLEDKKAEDVYDKVNDEFVLNVPEMKEYIRKIYNYKYMLVSKEVTTKNGAFYDQTKYNAKTINLIPIKKDKPTNIYGGYKGKVSSYMMLVKIQKKKEVIYKFVGVPRLWTDELDRLIDTDEKKALLKK

SEQ ID NO: 33 - protein, 1064 aa, Rhodopseudomonas palustris
MSECVTRRILGIDLGIASCGWGVIEVGEASGSIIASGVRCFDAPLIDKTGEPKSATRRTARGQRRIIRRRRQRMNAVRRLLAEFGVLTGRSPDALHQALLRLSQSVAGSQVTPWTLRAAAHERKLTNDELAVVLGHIARHRGFRSNSKNDGGANAADETSKMKKAMETTREGLARYHSFGAMIASDPKFADRKRNRDKDYSHTAKRSDLEDEVRTIFRSQTRFGSLVASEKLSQAFADAAFFQRPLQDSEDMVGSCPFEPGQKRTARRAPSFELFRFLSRLANLKLTVGRAPERRLTPDEIALAAKGFGETKKSITFKSLREALDLDPNARFSGVAKEKESTLDVAARTGGAAYGTKTLKDALGDAPWRSLSRMPEKLDRIAEILSFREDMKAIRNGLEEVGLDGLVVDALMQATANGDFKDFTRAAHISALAARNIIPGLREGLVYSDACTRVGYDHAARPAVPLSQIGSPVTRKALSEALKQVRAVAREYGPIDYFHIELARSIGKSAEERKKLTDGIEARNVEKEKRRKEAAEHLGRAPSDDELLRYELAKEQNFKCIYSGDPIDPAGISANDTRYQVDHILPWSRFGDDSYVNKTLCTARSNQNKRGRTPFEWFDADKTEAEWMEYSARVEDLKEVKGRKKRNYSIKDAASVEDKFKARNLTDTQWATRLLADELKRMFPPRECERVVTVRADGGNDGLSIVEERRVFTRPGAITSKLRRAWGLEGLKKQDGKRVEDDRHHAVDALVLAATTESLLNRLTVEVQQREREGRQDDIFHCSQPWPGFRVDVQRTVYGSETMPGIFVSRAERRRARGKAHDATVKQIRDIDGERIVFERKPIEKLTDKDLERIPVPEPYGKAADPKKLRDELVENLRAWIAAGKPKDKPPRSPKGDIIRKVRIETKDKVAVEINGGTVDRGDMARVDVFRKKNKKGVWEFYVIPIYPHQIVASALPPNRAVIAYKAESEWTAIDGCFEFAWSLNPMSYLELVKSNGELIEGYFRSMDRTTGAINLSPMSTNSETIRSIGVKTLSSFRKFTVDRLGRKFEIPREVRTWRGEACT

SEQ ID NO: 34 - protein, 1166 aa, Nitrobacter hamburgensis
MHVEIDFPHFSRGDSHLAMNKNEILRGSSVLYRLGLDLGSNSLGWFVTHLEKRGDRHEPVALGPGGVRIFPDGRDPQSGTSNAVDRRMARGARKRRDRFVERRKELIAALIKYNLLPDDARERRALEVLDPYALRKTALTDTLPAHHVGRALFHLNQRRGFQSNRKTDSKQSEDGAIKQAASRLATDKGNETLGVFFADMHLRKSYEDRQTAIRAELVRLGKDHLTGNARKKIWAKVRKRLFGDEVLPRADAPHGVRARATITGTKASYDYYPTRDMLRDEFNAIWAGQSAHHATITDEARTEIEHIIFYQRPLKPAIVGKCTLDPATRPFKEDPEGYRAPWSHPLAQRFRILSEARNLEIRDTGKGSRRLTKEQSDLVVAALLANREVKFDKLRTLLKLPAEARFNLESDRRAALDGDQTAARLSDKKGFNKAWRGFPPERQIAIVARLEETEDENELIAWLEKECALDGAAAARVANTTLPDGHCRLGLRAIKKIVPIMQDGLDEDGVAGAGYHIAAKRAGYDHAKLPTGEQLGRLPYYGQWLQDAVVGSGDARDQKEKQYGQFPNPTVHIGLGQLRRVVNDLIDKYGPPTEISIEFTRALKLSEQQKAERQREQRRNQDKNKARAEELAKFGRPANPRNLLKMRLWEELAHDPLDRKCVYTGEQISIERLLSDEVDIDHILPVAMTLDDSPANKIICMRYANRHKRKQTPSEAFGSSPTLQGHRYNWDDIAARATGLPRNKRWRFDANAREEFDKRGGFLARQLNETGWLARLAKQYLGAVTDPNQIWVVPGRLTSMLRGKWGLNGLLPSDNYAGVQDKAEEFLASTDDMEFSGVKNRADHRHHAIDGLVTALTDRSLLWKMANAYDEEHEKFVIEPPWPTMRDDLKAALEKMVVSHKPDHGIEGKLHEDSAYGFVKPLDATGLKEEEAGNLVYRKAIESLNENEVDRIRDIQLRTIVRDHVNVEKTKGVALADALRQLQAPSDDYPQFKHGLRHVRILKKEKGDYLVPIANRASGVAYKAYSAGENFCVEVFETAGGKWDGEAVRRFDANKKNAGPKIAHAPQWRDANEGAKLVMRIHKGDLIRLDHEGRARIMVVHRLDAAAGRFKLADHNETGNLDKRHATNNDIDPFRWLMASYNTLKKLAAVPVRVDELGRVWRVMPN

SEQ ID NO: 35 - protein, 641 aa, Nitrobacter hamburgensis
MHKRNSRSYRLGLDLGSNSLGWFVTHLEKRGDRYEPVALDPGGVRIFPDGRDPQSGMSNAVDRRMARGARKRRDRFVDPYALRKAALTNALPAHRVGRAIFHLNQRRGFQSNRKTDRKQSEDGAIKQAASKLKARMHEEAAPTLGAFFADMHLRKSYDDQQTAIRAELVRLGKDHLTGNARKKVWAKVRKRLFGDEVLRPKDTSDGARARATTTGTKASYDFYPTRAMLLDEFNAIWAAQREHHLAMTDEAKAEIEHIIFYHRPLKPAIVGKCTLDPATRPFKEDPEGYRAPWSHPLAQRFRILSEARNLEIRETGKTSRRLTKDQSDLVVAALLANREVKFDKLRTLLKLPAEARFNLESDRRSTATRPPHGCRTRRASIRRGAGFLRNGRSRSSPDWKKPKTKTNCSHGSKWNAHLTAQRPRASPIRRCRTAIAGSACAQSKRSCRSCRTSSMRMALRAPAITSWPSVPATTIPVDTFQQGGNAFGRILSVVTIELFAITDRVDPVQEQDARCFALRIAECRSDGLQHFAEVSLGLPPRNAAQDQRHSAGLCQSSCVGRFVPGTPCRRTPRSTSLHGKEPSAHAFGSTARSRPQLPASPRPCMSFRDGTSSSPARMPETLDRCAISRSNRSSVCRAERL

SEQ ID NO: 36 - protein, 1368 aa, Streptococcus pyogenes
MDKKYSIGLDIGTNSVGWAVITDDYKVPSKKFKVLGNTDRHSIKKNLIGALLFDSGEIAEATRLKRTARRRYTRRKNRICYLQEIFSNEMAKVDDSFFHRLEESFLVEEDKKHERHPIFGNIVDEVAYHEKYPTIYHLRKKLVDSTDKADLRLIYLALAHMIKFRGHFLIEGDLNPDNSDVDKLFIQLVQTYNQLFEENPINASGVDAKAILSARLSKSRRLENLIAQLPGEKKNGLFGNLIALSLGLTPNFKSNFDLAEDAKLQLSKDTYDDDLDNLLAQIGDQYADLFLAAKNLSDAILLSDILRLNSEITKAPLSASMIKRYDEHHQDLTLLKALVRQQLPEKYKEIFFDQSKNGYAGYIDGGASQEEFYKFIKPILEKMDGTEELLAKLNREDLLRKQRTFDNGSIPHQIHLGELHAILRRQEDFYPFLKDNREKIEKILTFRIPYYVGPLARGNSRFAWMTRKSEETITPWNFEEVVDKGASAQSFIERMTNFDKNLPNEKVLPKHSLLYEYFTVYNELTKVKYVTEGMRKPAFLSGEQKKAIVDLLFKTNRKVTVKQLKEDYFKKIECFDSVEISGVEDRFNASLGTYHDLLKIIKDKDFLDNEENEDILEDIVLTLTLFEDREMIEERLKTYAHLFDDKVMKQLKRRRYTVWGRLSRKLINGIRDKQSGKTILDFLKSDGFANRNFMQLIHDDSLTFKEDIQKAQVSGQGDSLHEHIANLAGSPAIKKGILQTVKVVDELVKVMGRHKPENIVIEMARENQTTQKGQKNSRERMKRIEEGIKELGSQILKEHPVENTQLQNEKLYLYYLQNGRDMYVDQELDINRLSDYDVDHIVPQSFIKDDSIDNKVLTRSDKNRGKSDNVPSEEVVKKMKNYWRQLLNAKLITQRKFDNLTKAERGGLSELDKAGFIKRQLVETRQITKHVAQILDSRMNTKYDENDKLIREVKVITLKSKLVSDFRKDFQFYKVREINNYHHAHDAYLNAVVGTALIKKYPKLESEFVYGDYKVYDVRKMLAKSEQEIGKATAKYFFYSNIMNFFKTEITLANGEIRKRPLIETNGETGEIVWDKGRDFATVRKVLSMPQVNIVKKTEVQTGGFSKESILPKRNSDKLIARKKDWDPKKYGGFDSPTVAYSVLVVAKVEKGKSKKLKSVKELLGITIMERSSFEKNPIDFLEAKGYKEVRKDLIIKLPKYSLFELENGRKRMLASAGELQKGNELALPSKYVNFLYLASHYEKLKGSPEDNEQKQLFVEQHKHYLDEIIEQISEFSKRVILADANLDKVLSAYNKHRDKPIREQAENIIHLFTLTNLGAPTAFKYFDTTIDRKRYTSTKEVLDATFIHQSITGLYETRIDLSQLGGD

SEQ ID NO: 37 - protein, 1368 aa, Streptococcus pyogenes
MDKKYSIGLDIGTNSVGWAVITDDYKVPSKKFKVLGNTDRHSIKKNLIGALLFDSGETAEATRLKRTARRRYTRRKNRICYLQEIFSNEMAKVDDSFFHRLEESFLVEEDKKHERHPIFGNIVDEVAYHEKYPTIYHLRKKLVDSTDKADLRLIYLALAHMIKFRGHFLIEGDLNPDNSDVDKLFIQLVQTYNQLFEENPINASGVDAKAILSARLSKSRRLENLIAQLPGEKKNGLFGNLIALSLGLTPNFKSNFDLAEDAKLQLSKDTYDDDLDNLLAQIGDQYADLFLAAKNLSDAILLSDILRLNSEITKAPLSASMIKRYDEHHQDLTLLKALVRQQLPEKYKEIFFDQSKNGYAGYIDGGASQEEFYKFIKPILEKMDGTEELLAKLNREDLLRKQRTFDNGSIPHQIHLGELHAILRRQEDFYPFLKDNREKIEKILTFRIPYYVGPLARGNSRFAWMTRKSEETITPWNFEEVVDKGASAQSFIERMTNFDKNLPNEKVLPKHSLLYEYFTVYNELTKVKYVTEGMRKPAFLSGEQKKAIVDLLFKTNRKVTVKQLKEDYFKKIECFDSVEISGVEDRFNASLGTYHDLLKIIKDKDFLDNEENEDILEDIVLTLTLFEDREMIEERLKTYAHLFDDKVMKQLKRRRYTGWGRLSRKLINGIRDKQSGKTILDFLKSDGFANRNFMQLIHDDSLTFKEDIQKAQVSGQGDSLHEHIANLAGSPAIKKGILQTVKVVDELVKVMGRHKPENIVIEMARENQTTQKGQKNSRERMKRIEEGIKELGSQILKEHPVENTQLQNEKLYLYYLQNGRDMYVDQELDINRLSDYDVDHIVPQSFIKDDSIDNKVLTRSDKNRGKSDNVPSEEVVKKMKNYWRQLLNAKLITQRKFDNLTKAERGGLSELDKAGFIKRQLVETRQITKHVAQILDSRMNTKYDENDKLIREVKVITLKSKLVSDFRKDFQFYKVREINNYHHAHDAYLNAVVGTALIKKYPKLESEFVYGDYKVYDVRKMIAKSEQEIGKATAKYFFYSNIMNFFKTEITLANGEIRKRPLIETNGETGEIVWDKGRDFATVRKVLSMPQVNIVKKTEVQTGGFSKESILPKRNSDKLIARKKDWDPKKYGGFDSPTVAYSVLVVAKVEKGKSKKLKSVKELLGLTIMERSSFEKNPIDFLEAKGYKEVKKDLIIKLPKYSLFELENGRKRMLASAGELQKGNELALPSKYVNFLYLASHYEKLKGSPEDNEQKQLFVEQHKHYLDEIIEQISEFSKRVILADANLDKVLSAYNKHRDKPIREQAENIIHLFTLTNLGAPAAFKYFDTTIDRKRYTSTKEVLDATLIHQSITGLYETRIDLSQLGGD

SEQ ID NO: 38 - protein, 1368 aa, Streptococcus pyogenes
MDKKYSIGLDIGTNSVGWAVITDDYKVPSKKFKVLGNTDRHSIKKNLIGALLFDSGEIAEATRLKRTARRRYTRRKNRICYLQEIFSNEMAKVDDSFFHRLEESFLVEEDKKHERHPIFGNIVDEVAYHEKYPTIYHLRKKLVDSTDKADLRLIYLALAHMIKFRGHFLIEGDLNPDNSDVDKLFIQLVQTYNQLFEENPINASGVDAKAILSARLSKSRRLENLIAQLPGEKKNGLFGNLIALSLGLTPNFKSNFDLAEDAKLQLSKDTYDDDLDNLLAQIGDQYADLFLAAKNLSDAILLSDILRLNSEITKAPLSASMIKRYDEHHQDLTLLKALVRQQLPEKYKEIFFDQSKNGYAGYIDGGASQEEFYKFIKPILEKMDGTEELLAKLNREDLLRKQRTFDNGSIPHQIHLGELHAILRRQEDFYPFLKDNREKIEKILTFRIPYYVGPLARGNSRFAWMTRKSEETITPWNFEEVVDKGASAQSFIERMTNFDKNLPNEKVLPKHSLLYEYFTVYNELTKVKYVTEGMRKPAFLSGEQKKAIVDLLFKTNRKVTVKQLKEDYFKKIECFDSVEISGVEDRFNASLGTYHDLLKIIKDKDFLDNEENEDILEDIVLTLTLFEDREMIEERLKTYAHLFDDKVMKQLKRRRYTGWGRLSRKLINGIRDKQSGKTILDFLKSDGFANRNFMQLIHDDSLTFKEDIQKAQVSGQGDSLHEHIANLAGSPAIKKGILQTVKVVDELVKVMGRHKPENIVIEMARENQTTQKGQKNSRERMKRIEEGIKELGSQILKEHPVENTQLQNEKLYLYYLQNGRDMYVDQELDINRLSDYDVDHIVPQSFIKDDSIDNKVLTRSDKNRGKSDNVPSEEVVKKMKNYWRQLLNAKLITQRKFDNLTKAERGGLSELDKAGFIKRQLVETRQITKHVAQILDSRMNTKYDENDKLIREVKVITLKSKLVSDFRKDFQFYKVREINNYHHAHDAYLNAVVGTALIKKYPKLESEFVYGDYKVYDVRKMLAKSEQEIGKATAKYFFYSNIMNFFKTEITLANGEIRKRPLIETNGETGEIVWDKGRDFATVRKVLSMPQVNIVKKTEVQTGGFSKESILPKRNSDKLIARKKDWDPKKYGGFDSPTVAYSVLVVAKVEKGKSKKLKSVKELLGITIMERSSFEKNPIDFLEAKGYKEVRKDLIIKLPKYSLFELENGRKRMLASAGELQKGNELALPSKYVNFLYLASHYEKLKGSPEDNEQKQLFVEQHKHYLDEIIEQISEFSKRVILADANLDKVLSAYNKHRDKPIREQAENIIHLFTLTNLGAPTAFKYFDTTIDRKRYTSTKEVLDATFIHQSITGLYETRIDLSQLGGD

SEQ ID NO: 39 - protein, 1371 aa, Streptococcus pyogenes
MDKKYSIGLDIGTNSVGWAVITDDYKVPSKKFKVLGNTDRHSIKKNLIGALLFDSGETAEATRLKRTARRRYTRRKNRICYLQEIFSNEMAKVDDSFFHRLEESFLVEEDKKHERHPIFGNIVDEVAYHEKYPTIYHLRKKLADSTDKADLRLIYLALAHMIKFRGHFLIEGDLNPDNSDVDKLFIQLVQTYNQLFEENPINASRVDAKAILSARLSKSRRLENLIAQLPGEKKNGLFGNLIALSLGLTPNFKSNFDLAEDAKLQLSKDTYDDDLDNLLAQIGDQYADLFLAAKNLSDATLLSDILRVNSEITKAPLSASMIKRYDEHHQDLTLLKALVRQQLPEKYKEIFFDQSKNGYAGYIDGGASQEEFYKFIKPILEKMDGTEELLAKLNREDLLRKQRTFDNGSIPHQIHLGELHAILRRQEDFYPFLKDNREKIEKILTFRIPYYVGPLARGNSRFAWMTRKSEETITPWNFEEVVDKGASAQSFIERMTNFDKNLPNEKVLPKHSLLYEYFTVYNELTKVKYVTEGMRKPAFLSGEQKKAIVDLLFKTNRKVTVKQLKEDYFKKIECFDSVEISGVEDRFNASLGTYHDLLKIIKDKDFLDNEENEDILEDIVLTLTLFEDKEMIEERLKTYAHLFDDKVMKQLKRRHYTGWGRLSRKLINGIRDKQSGKTILDFLKSDGFANRNFIQLIHDDSLTFKEAIQKAQVSGQGHSLHEQIANLAGSPAIKKGILQSVKVVDELVKVMGHKPENIVIEMARENQTTQKGQKNSRERMKRIEEGIKELGSQILKEHPVENTQLQNEKLYLYYLQNGRDMYVDQELDINRLSDYDVDHIVPQSFIKDDSIDNKVLTRSDKNRGKSDDVPSEEVVKKMKNYWRQLLNAKLITQRKFDNLTKAERGGLSELDKAGFIKRQLVETRQITKHVAQILDSRMNTKYDENDKLIREVKVITLKSKLVSDFRKDFQFYKVREINNYHHAHDAYLNAVVGTALIKKYPKLESEFVYGDYKVYDVRKMIAKSEQEIGKATAKRFFYSNIMNFFKTEITLANGEIRKRPLIETNEETGEIVWDKGRDFATVRKVLSMPQVNIVKKTEVQTGALTNESIYARGSFDKLISRKHRFESSKYGGFGSPTVTYSVLVVAKSKVQDGKVKKIKTGKELIGITLLDKLVFEKNPLKFIEDKGYGNVQIDKCIKLPKYSLFEFENGTRRMLASVMANNNSRGDLQKANEMFLPAKLVTLLYHAHKIESSKELEHEAYILDHYNDLYQLLSYIERFASLYVDVEKNISKVKELFSNIESYSISEICSSVINLLTLTASGAPADFKFLGTTIPRKRYGSPQSILSSTLIHQSITGLYETRIDLSQLGSD

SEQ ID NO: 40 - protein, 1121 aa, Streptococcus thermophilus
MSDLVLGLDIGIGSVGVGILNKVTGEIIHKNSRIFPAAQAENNLVRRTNRQGRRLARRKKHRRVRLNRLFEESGLITDFTKISINLNPYQLRVKGLTDELSNEELFIALKNMVKHRGISYLDDASDDGNSSVGDYAQIVKENSKQLETKTPGQIQLERYQTYGQLRGDFTVEKDGKKHRLINVFPTSAYRSEALRILQTQQEFNPQITDEFINRYLEILTGKRKYYHGPGNEKSRTDYGRYRTSGETLDNIFGILIGKCTFYPDEFRAAKASYTAQEFNLLNDLNNLTVPTETKKLSKEQKNQIINYVKNEKAMGPAKLFKYIAKLLSCDVADIKGYRIDKSGKAEIHTFEAYRKMKTLETLDIEQMDRETLDKLAYVLTLNTEREGIQEALEHEFADGSFSQKQVDELVQFRKANSSIFGKGWHNFSVKLMMELIPELYETSEEQMTILTRLGKQKTTSSSNKTKYIDEKLLTEEIYNPVVAKSVRQAIKIVNAAIKEYGDFDNIVIEMARETNEDDEKKAIQKIQKANKDEKDAAMLKAANQYNGKAELPHSVFHGHKQLATKIRLWHQQGERCLYTGKTISIHDLINNSNQFEVDHILPLSITFDDSLANKVLVYATANQEKGQRTPYQALDSMDDAWSFRELKAFVRESKTLSNKKKEYLLTEEDISKFDVRKKFIERNLVDTRYASRVVLNALQEHFRAHKIDTKVSVVRGQFTSQLRRHWGIEKTRDTYHHHAVDALIIAASSQLNLWKKQKNTLVSYSEDQLLDIETGELISDDEYKESVFKAPYQHFVDTLKSKEFEDSILFSYQVDSKFNRKISDATIYATRQAKVGKDKADETYVLGKIKDIYTQDGYDAFMKIYKKDKSKFLMYRHDPQTFEKVIEPILENYPNKQINEKGKEVPCNPFLKYKEEHGYIRKYSKKGNGPEIKSLKYYDSKLGNHIDITPKDSNNKVVLQSVSPWRADVYFNKTTGKYEILGLKYADLQFEKGTGTYKISQEKYNDIKKKEGVDSDSEFKFTLYKNDLLLVKDTETKEQQLFRFLSRTMPKQKHYVELKPYDKQKFEGGEALIKVLGNVANSGQCKKGLGKSNISIYKVRTDVLGNQHIIKNEGDKPKLDF

SEQ ID NO: 41 - protein, 1388 aa, Streptococcus thermophilus
MTKPYSIGLDIGTNSVGWAVTTDNYKVPSKKMKVLGNTSKKYIKKNLLGVLLFDSGITAEGRRLKRTARRRYTRRRNRILYLQEIFSTEMATLDDAFFQRLDDSFLVPDDKRDSKYPIFGNLVEEKAYHDEFPTIYHLRKYLADSTKKADLRLVYLALAHMIKYRGHFLIEGEFNSKNNDIQKNFQDFLDTYNAIFESDLSLENSKQLEEIVKDKISKLEKKDRILKLFPGEKNSGIFSEFLKLIVGNQADFRKCFNLDEKASLHFSKESYDEDLETLLGYIGDDYSDVFLKAKKLYDAILLSGFLTVTDNETEAPLSSAMIKRYNEHKEDLALLKEYIRNISLKTYNEVFKDDTKNGYAGYIDGKTNQEDFYVYLKKLLAEFEGADYFLEKIDREDFLRKQRTFDNGSIPYQIHLQEMRAILDKQAKFYPFLAKNKERIEKILTFRIPYYVGPLARGNSDFAWSIRKRNEKITPWNFEDVIDKESSAEAFINRMTSFDLYLPEEKVLPKHSLLYETFNVYNELTKVRFIAESMRDYQFLDSKQKKDIVRLYFKDKRKVTDKDIIEYLHAIYGYDGIELKGIEKQFNSSLSTYHDLLNIINDKEFLDDSSNEAIIEEIIHTLTIFEDREMIKQRLSKFENIFDKSVLKKLSRRHYTGWGKLSAKLINGIRDEKSGNTILDYLIDDGISNRNFMQLIHDDALSFKKKIQKAQIIGDEDKGNIKEVVKSLPGSPAIKKGILQSIKIVDELVKVMGGRKPESIVVEMARENQYTNQGKSNSQQRLKRLEKSLKELGSKILKENIPAKLSKIDNNALQNDRLYLYYLQNGKDMYTGDDLDIDRLSNYDIDHIIPQAFLKDNSIDNKVLVSSASNRGKSDDVPSLEVVKKRKTFWYQLLKSKLISQRKFDNLTKAERGGLSPEDKAGFIQRQLVETRQITKHVARLLDEKFNNKKDENNRAVRTVKIITLKSTLVSQFRKDFELYKVREINDFHHAHDAYLNAVVASALLKKYPKLEPEFVYGDYPKYNSFRERKSATEKVYFYSNIMNIFKKSISLADGRVIERPLIEVNEETGESVWNKESDLATVRRVLSYPQVNVVKKVEEQNHGLDRGKPKGLFNANLSSKPKPNSNENLVGAKEYLDPKKYGGYAGISNSFTVLVKGTIEKGAKKKITNVLEFQGISILDRINYRKDKLNFLLEKGYKDIELIIELPKYSLFELSDGSRRMLASILSTNNKRGEIHKGNQIFLSQKFVKLLYHAKRISNTINENHRKYVENHKKEFEELFYYILEFNENYVGAKKNGKLLNSAFQSWQNHSIDELCSSFIGPTGSERKGLFELTSRGSAADFEFLGVKIPRYRDYTPSSLLKDATLIHQSVTGLYETRIDLAKLGEG

SEQ ID NO: 42 - protein, 1138 aa, Acidothermus cellulolyticus
MGGSEVGTVPVTWRLGVDVGERSIGLAAVSYEEDKPKEILAAVSWIHDGGVGDERSGASRLALRGMARRARRLRRFRRARLRDLDMLLSELGWTPLPDKNVSPVDAWLARKRLAEEYVVDETERRRLLGYAVSHMARHRGWRNPWTTIKDLKNLPQPSDSWERTRESLEARYSVSLEPGTVGQWAGYLLQRAPGIRLNPTQQSAGRRAELSNATAFETRLRQEDVLWELRCIADVQGLPEDVVSNVIDAVFCQKRPSVPAERIGRDPLDPSQLRASRACLEFQEYRIVAAVANLRIRDGSGSRPLSLEERNAVIEALLAQTERSLTWSDIALEILKLPNESDLTSVPEEDGPSSLAYSQFAPFDETSARIAEFIAKNRRKIPTFAQWWQEQDRTSRSDLVAALADNSIAGEEEQELLVHLPDAELEALEGLALPSGRVAYSRLTLSGLTRVMRDDGVDVHNARKTCFGVDDNWRPPLPALHEATGHPVVDRNLAILRKFLSSATMRWGPPQSIVVELARGASESRERQAEEEAARRAHRKANDRIRAELRASGLSDPSPADLVRARLLELYDCHCMYCGAPISWENSELDHIVPRTDGGSNRHENLAITCGACNKEKGRRPFASWAETSNRVQLRDVIDRVQKLKYSGNMYWTRDEFSRYKKSVVARLKRRTSDPEVIQSIESTGYAAVALRDRLLSYGEKNGVAQVAVFRGGVTAEARRWLDISIERLFSRVAIFAQSTSTKRLDRRHHAVDAVVLTTLTPGVAKTLADARSRRVSAEFWRRPSDVNRHSTEEPQSPAYRQWKESCSGLGDLLISTAARDSIAVAAPLRLRPTGALHEETLRAFSEHTVGAAWKGAELRRIVEPEVYAAFLALTDPGGRFLKVSPSEDVLPADENRHIVLSDRVLGPRDRVKLFPDDRGSIRVRGGAAYIASFHHARVFRWGSSHSPSFALLRVSLADLAVAGLLRDGVDVFTAELPPWTPAWRYASIALVKAVESGDAKQVGWLVPGDELDFGPEGVTTAAGDLSMFLKYFPERHWVVTGFEDDKRINLKPAFLSAEQAEVLRTERSDRPDTLTEAGEILAQFFPRCWRATVAKVLCHPGLTVIRRTALGQPRWRRGHLPYSWRPWSADPWSGGTP

SEQ ID NO: 43 - protein, 1629 aa, Francisella novicida
MNFKILPIAIDLGVKNTGVFSAFYQKGTSLERLDNKNGKVYELSKDSYTLLMNNRTARRHQRRGIDRKQLVKRLFKLIWTEQLNLEWDKDTQQAISFLFNRRGFSFITDGYSPEYLNIVPEQVKAILMDIFDDYNGEDDLDSYLKLATEQESKISEIYNKLMQKILEFKLMKLCTDIKDDKVSTKTLKEITSYEFELLADYLANYSESLKTQKFSYTDKQGNLKELSYYHHDKYNIQEFLKRHATINDRILDTLLTDDLDIWNFNFEKFDFDKNEEKLQNQEDKDHIQAHLHHFVFAVNKIKSEMASGGRHRSQYFQEITNVLDENNHQEGYLKNFCENLHNKKYSNLSVKNLVNLIGNLSNLELKPLRKYFNDKIHAKADHWDEQKFTETYCHWILGEWRVGVKDQDKKDGAKYSYKDLCNELKQKVTKAGLVDFLLELDPCRTIPPYLDNNNRKPPKCQSLILNPKFLDNQYPNWQQYLQELKKLQSIQNYLDSFETDLKVLKSSKDQPYFVEYKSSNQQIASGQRDYKDLDARILQFIFDRVKASDELLLNEIYFQAKKLKQKASSELEKLESSKKLDEVIANSQLSQILKSQHTNGIFEQGTFLHLVCKYYKQRQRARDSRLYIMPEYRYDKKLHKYNNTGRFDDDNQLLTYCNHKPRQKRYQLLNDLAGVLQVSPNFLKDKIGSDDDLFISKWLVEHIRGFKKACEDSLKIQKDNRGLLNHKINIARNTKGKCEKEIFNLICKIEGSEDKKGNYKHGLAYELGVLLFGEPNEASKPEFDRKIKKFNSIYSFAQIQQIAFAERKGNANTCAVCSADNAHRMQQIKITEPVEDNKDKIILSAKAQRLPAIPTRIVDGAVKKMATILAKNIVDDNWQNIKQVLSAKHQLHIPIITESNAFEFEPALADVKGKSLKDRRKKALERISPENIFKDKNNRIKEFAKGISAYSGANLTDGDFDGAKEELDHIIPRSHKKYGTLNDEANLICVTRGDNKNKGNRIFCLRDLADNYKLKQFETTDDLEIEKKIADTIWDANKKDFKFGNYRSFINLTPQEQKAFRHALFLADENPIKQAVIRAINNRNRTFVNGTQRYFAEVLANNIYLRAKKENLNTDKISFDYFGIPTIGNGRGIAEIRQLYEKVDSDIQAYAKGDKPQASYSHLIDAMLAFCIAADEHRNDGSIGLEIDKNYSLYPLDKNTGEVFTKDIFSQIKITDNEFSDKKLVRKKAIEGFNTHRQMTRDGIYAENYLPILIHKELNEVRKGYTWKNSEEIKIFKGKKYDIQQLNNLVYCLKFVDKPISIDIQISTLEELRNILTTNNIAATAEYYYINLKTQKLHEYYIENYNTALGYKKYSKEMEFLRSLAYRSERVKIKSIDDVKQVLDKDSNFIIGKITLPFKKEWQRLYREWQNTTIKDDYEFLKSFFNVKSITKLHKKVRKDFSLPISTNEGKFLVKRKTWDNNFIYQILNDSDSRADGTKPFIPAFDISKNEIVEAIIDSFTSKNIFWLPKNIELQKVDNKNIFAIDTSKWFEVETPSDLRDIGIATIQYKIDNNSRPKVRVKLDYVIDDDSKINYFMNHSLLKSRYPDKVLEILKQSTIIEFESSGFNKTIKEMLGMKLAGIYNETSNN

SEQ ID NO: 44 - protein, 1068 aa, Verminephrobacter eiseniae
MNKAVAYRLALDLGSTSLGWAIFRLNEAREPTAIIRAGVRIFSDGRNANSEPLAVHRRVARAMRRRRDRLLKRKKRMHDQLVQHGFFPAEVAERKELERLNPYQLRAKGLHEALTPGEFARALFHINQRRGFKSNRKTDRKDNDSGALKQAISELRKRIQDSDCATAGEWFWKERMQQKPEGVRGQWVRARYRKTPSTTDEGKKRIGYDLYVDRAMVEQEFDALWAAQAALQPGLFTEAARAELKDTLLYQRDLRPVKPGRCTLLPAEERAPLALPSTQRFRILQEVNNLRLLDEALREVPLNLAQRDAVVSALEGKKELSFAAIRKLLTLSGKFNLEDEKRAELKGNATSVILARKDLFGDAWAGFDAAVQDEIVWRLVSQESEGALIAWLQQHTGVDGVCAEAIVNTRLPDGYGRLSRKALERIVPALQREVCTYDKAVQAAGFAHHSDLGFDFDYAEDEVQQVGEHTIASTGEVQAQYAFKQLPYYGKALQRHVAFGSGDAKDHEEKCYGKIANPTVHIGLNQVRTVVNALIRRYGHPTEVVVELARDLKQSREQKQQTQREQADNQKRNEDIRKRIAPILETSPERVRDRDIKKWILWEELNKKDIADRHCPYSGERISATMLLSEAVEIEHILPFSRTLDDSLNNRTVAMRRANRIKGDRTPWEARADFEAQGWRYEAILQRAEGMPPRKRYRFAEDGYQRWLGKDRNFLARALNDTSYLSRLAANYLRLVCPQGVRVIPGQMTDKLRGKFGLNSVLGLDGKKNRNDHRHHAVDACVIGVTDQGLMQRFANASKQARENGLTRLVQDMLLPWWPSYYDHVERAVRHIRVSHRPDHGFEGAMMKGTAHGIREDGIREDGRIKQRPKAKGSADHKTITLIPIDEPRQLARHGVDAEGKPLPYKGYASGSNYCIEITKNGKGKWEGQVISTFDAYRIKAAADAAARAGQVISTVEADSIVRKSGWERLRGAQSQNGQPLVMRLVIGDSVRMEVDGRDEVMRVVKMSGKEMVFAPVREANVDKRNNMPDEQDPFTYTYKRADQLRKAKARQVTISPIGELRDPGFKG

SEQ ID NO: 45 - protein, 1125 aa, Francisella tularensis
MNVKILPIAIDLDVKNTGVFSAFYQKGTSLEKLDNKNGKVYELSKDSYTLLMNNRTARRHQRRGIDRKQLVKRLFKLVWTEQLNLEWDKDTQQAISFLFNRRGFSFITDGYSTEYLNIVPEQVKAILMDIFDDYNGEDDLDSYLKLATEQESKISEIYNKLMQKILEFKLRKLCTDIKDDKVSTKTLKEITSYEFELLADYLANYSESLKIQKFSYTDKQGNLKELSYYHHDKYNIQEFLKRHATINDEILDTLLTDDFDIWNFNFEKFDFDKNEEKLQNQEDKDHTQAHLHHFVFAVNKIKSEMASGGRHRSQYFQEITNVLDENNHQEGYLKNFCENLHNKKYSNLSVKNLVNLVGNLSNLELKPLRKYFNDKIHAKADHWDEQKFTETYCHWILGEWRVGVKDQDKKDGAKYSYKDLCNELKQKVTKAGLIDFLLELDPCRTIPPYLDNNNRKPPKCQSLILNPKFLDNQYPNWQQYLQELKKLQSIQDYLDSFETDLKDLKSSKDQPYFVEYKSSNQQMASGQRDYKDLDARILQFIFDRVKASDELLLNEIYFQAKKLKQKASSELEKLESSKKLDEVIANSQLSQILKSQHTNGIFEQGTFLHLVCKYYKQRQRARDSRLYIMPEYRYDKKLDKYNNTGRFDDNNQLLTYCNHKPRQKRYQLLNDLAGVLQVSRNQLLSSVEEWFQQAQRVGEISKSQDEQIFEWLKSFKIASYCKAAVEMQKQYRGTLKNAIQTAIFRQSENINKNKNKNTGNQQQALSENSKDVKSLTADEKKLLKLIENIAKASQKIGESLGLNDKQIKKFNSIYSFAQIQQIAFAERKGNANTCAVCSADNAHRMQQIKITELVEDNKDNIILSAKAQRLPAIPTRIVDGAVKKMATILAKNIVDDNWQNIKQVLSAKHQLHIPIITESNAFEFEPALADVKGKSLKDRRKKALERISPENIFKDKNNRIKEFAKGISAYSGANLTDGDFDGAKEELDHIIPRSHKKYGTLNDEANLICVTRDDNKNIFAIDTSKWFEIETPSDLRDIGVATIQYKIDNNSRPKVRVKLDYVIDDDSKINYFMNHSLLKSRYPDKVLEILKQSTIIEFESSGFNKTIKEMLGMTLAGIYNETSNN

SEQ ID NO: 46 - protein, 1064 aa, Bradyrhizobium sp.
MKRTSLRAYRLGVDLGANSLGWFVVWLDDHGQPEGLGPGGVRIFPDGRNPQSKQSNAAGRRLARSARRRRDRYLQRRGKLMGLLVKHGLMPADEPARKRLECLDPYGLRAKALDEVLPLHHVGRALFHLNQRRGLFANRAIEQGDKDASAIKAAAGRLQTSMQACGARTLGEFLNRRHQLRATVRARSPVGGDVQARYEFYPTRAMVDAEFEAIWAAQAPHHPTMTAEAHDTIREAIFSQRAMKRPSIGKCSLDPATSQDDVDGFRCAWSHPLAQRFRIWQDVRNLAVVETGPTSSRLGKEDQDKVARALLQTDQLSFDEIRGLLGLPSDARFNLESDRRDHLKGDATGAILSARRHFGPAWHDRSLDRQIDIVALLESALDEAAIIASLGTTHSLDEAAAQRALSALLPDGYCRLGLRAIKRVLPLMEAGRTYAEAASAAGYDHALLPGGKLSPTGYLPYYGQWLQNDVVGSDDERDTNERRWGRLPNPTVHIGIGQLRRVVNELIRWHGPPAEITVELTRDLKLSPRRLAELEREQAENQRKNDKRTSLLRKLGLPASTHNLLKLRLWDEQGDVASECPYTGEAIGLERLVSDDVDIDHLIPFSISWDDSAANKVVCMRYANREKGNRTPFEAFGHRQGRPYDWADIAERAARLPRGKRWRFGPGARAQFEELGDFQARLLNETSWLARVAKQYLAAVTHPHRIHVLPGRLTALLRATWELNDLLPGSDDRAAKSRKDHRHHAIDALVAALTDQALLRRMANAHDDTRRKIEVLLPWPTFRIDLETRLKAMLVSHKPDHGLQARLHEDTAYGTVEHPETEDGANLVYRKTFVDISEKEIDRIRDRRLRDLVRAHVAGERQQGKTLKAAVLSFAQRRDIAGHPNGIRHVRLTKSIKPDYLVPIRDKAGRIYKSYNAGENAFVDILQAESGRWIARATTVFQANQANESHDAPAAQPIMRVFKGDMLRIDHAGAEKFVKIVRLSPSNNLLYLVEHHQAGVFQTRHDDPEDSFRWLFASFDKLREWNAELVRIDTLGQPWRRKRGLETGSEDATRIGWTRPKKWP

SEQ ID NO: 47 - protein, 1354 aa, Flavobacterium psychrophilum
MKKILGLDLGTNSIGWAFINEAENEIEVSSIVNTGVRIVPLTTDEESDFKKGNTISINADRTLKRGARRGLQRFKQRREALLETFNRIKFIATDFVYAETGAATTFSSYQLRAKSAVEAVTKEELVKVLLMLNKKRGYKSSRKAKTAEEGDAIDGMKIAKEIFENNLTPGQWVYNSLSKGGKFIPDFYHSDLQKELEKIVRFQNQFHSEQINDKLLADIQGKSRTQTSQHFSKTLNIPLAENKGTREETKLQHYQWRNEALANELDMKILAFIITEINNQINQSSGYLGAISDRSKELYFNQETVGQYQYKQLQENVHAKLKNQVFYRQDYLDEFEKIWETQAKFHSELNEKLKAEIRDITIFYQRKLKSQKHLVSFCEFEKGHKAIPKSSPLFQEFRIWQNLNNVVVKNETTKEVFELSEELKQLIAEELQFKESMTDVQMLTFCELKKGTHTVNFKKIEGNRTNTSIYKAFEKILEVEGYEIDFSKMKPLEIKETVAPIFETLNINTVILDFDPTIQGNDFDKQPYYQLWHLLYSAEDDDKLKETLKTKFGFKENHLPFILNINLQADYGSLSAKAIKKILPHLMDGHIYDKACLMVGYNHSSSLTTAQNNDRVLKDTLELLKKNSLRNPVVEKILNQMINVINAIMKDPAMGKPDEIRVELARELKANNEQRKKATSDINTATTEHERIRKLLHSEFNIPRVTRNDIIRYKLWLETGGISLYTGNPIKASDLFSKNYDIEHIIPKSRLFDDSFSNKTLCERQLNIDKSNKTAYSFLQEKLSENDFAAYENRVKDLFKTGKIKSYTKYKKLLMADNEIPEGFIDRQLRETQYIAKKAKEILLEVSRNVTATIGSVTDKLRQDWELVDVMKELNWEKYDKLGLTHIEEGKNGERLSKIKDWTKRNDHRHHAMDAITVAFTKPAYIQYLNNLNAKTQGENKANSIIGIENKHLYRDKNNKLRFISPMKNFREEAKKQLESILISYKAKNKVVTKNKNTTKKSGGTNQKIQLTPRGRLHKETVYGKLQQYATKEEKVNASFTEDYIQKVAKKEYREALLKRLEENDNDPKKAFTGKNALNKTPIYISLKDNIIVPEKVKTVWLETDYTIRKDITPDLKIDKVIDVGIKRILQNRLNEFNGDPKKAFVNLGESPIWLNKEKGIAIKRVTISGVSNAQALHTKKDHLGNEILDKNGNPIPVDFISTGNNHHVAIYRDEKGNLQEEVVSFYDAVIRRNLGLSVINKNHEKGWEFLFSMKQNEFFIFPSDGFNPHEIDLLNPNNYHLISPNIFRVQKISTKNYMFNHHLETKAVDGEMLKSKKELSKTSYHFIQTPTNLNGIIKVRINHLGKIVHLGEY

SEQ ID NO: 48 - protein, 1062 aa, Actinobacillus succinogenes
MNLNYILGLDLGIASVGWAVVEIDEQENPQRLIDVGVRTFDRAEVLKTGESLALARRLARSSRRLVKRRAERIKKAKRLLKAENLLLSADEILPNEAWQLRVKGLDQKLERQEWAAVLLHLLKHRGYLSQRKNESKSENKELGALLSGVAINHQILQSAEYRTPAEIAVNKFQAEEGHIRNQRGAYTHTFSRLDLLAEMELLFQRQATLGNPHTSTKLLENLTALLMWQKPALAGEAILKMLGKCTFEPTEYKAAKNSYSAERFVWLTKLNNLRILEQGAERALTDNERFALLDQPYEKAKLTYAQVRTLLGLSDEAIFKGLRYQGEDKKAVETKTTLMEVKAYHQIRKALEGLDLKAEWNELKNNPALLDEIGTAFSLYKTDDDIHRYLDGKLSESVLNALLENLNFDKFIQLSLKALQQILPLMLQGQRYDEAVSAIYGDHYGKKSDEIDRLLPNIPTDEIRNPVVLRTLTQARKVINAVVRLYGSPARIHIETGREVGKSYQDRKKLEKQQEENRKQRENAVKKFKEYFPNFVGEPKGKDILKMRLYELQQAKCLYSGKSLELYRLLEKGYVEVDHALPFSRTWDDSFNNKVLVLANENQNKGNATPYEWLDGKNNSEGWQHFVARVQTSGFSYAKKQRVLIQELDEKSFIERNLNDTRYVARFLCNHIADNMLLTGKGKRKVFASNGQITALLRGCWGLQKVRENNDRHHALDAVVVACSTKSMQDKITKFVKYKEGRLFKDKKDGVYKGERINRETGEIISLHFPTPWKFFKENVEIRIFSENPKLELENRLPDYPQYNHEFVQPLFVSRMPTRKMTGQGHMETVKSAKRLDKGLSVLKVPLTQLKLSDLERMVNREREMALYEALKECLEQFGNDPAKAFAEPFYKKGGALVKAVRVEQTQKSGVLVRNGNGVADNATGSIVRVDVFTKGGKYFLVPIYTWQVAKGILPNKAVIQGKDESEWEEMDENAVFQFSMHKNDLIKVKTKKGEIFGYFNGLDRATGSIEIEEHDLEKSKGKNGSHRGLGVKTAFFLEKYQVDELGKNIRPCRPTKRQHVR

SEQ ID NO: 49 - protein, 1340 aa, Dorea longicatena
MEQEYYLGLDMGTGSVGWAVTDSEYHVLRKHGKALWGVRLFESASTAEERRMFRTSRRRLDRRNWRIEILQEIFAEEISKKDPGFFLRMKESKYYPEDKRDINGNCPELPYALFVDDDFTDKDYHKKFPTIYHLRKMLMNTEETPDIRLVYLAIHHMMKHRGHFLLSGDINEIKEFGTTFSKLLENIKNEELDWNLELGKEEYAVVESILKDNMLNRSTKKTRLIKALKAKSICEKAVLNLLAGGTVKLSDIFGLEELNETERPKISFADNGYDDYIGEVENELGEQFYIIETAKAVYDWAVLVEILGKYTSISEAKVATYEKHKSDLQFLKKIVRKYLTKEEYKDIFVSTSDKLKNYSAYIGMTKINGKKVDLQSKRCSKEEFYDFIKKNVLKKLEGQPEYEYLKEELERETFLPKQVNRDNGVIPYQIHLYELKKILGNLRDKIDLIKENEDKLVQLFEFRIPYYVGPLNKIDDGKEGKFTWAVRKSNEKIYPWNFENVVDIEASAEKFIRRMTNKCTYLMGEDVLPKDSLLYSKYMVLNELNNVKLDGEKLSVELKQRLYTDVFCKYRKVTVKKIKNYLKCEGIISGNVEITGIDGDFKASLTAYHDFKEILTGTELAKKDKENIITNIVLFGDDKKLLKKRLNRLYPQITPNQLKKICALSYTGWGRFSKKFLEEITAPDPETGEVWNIITALWESNNNLMQLLSNEYRFMEEVETYNMGKQTKTLSYETVENMYVSPSVKRQIWQTLKIVKELEKVMKESPKRVFIEMAREKQESKRTESRKKQLIDLYKACKNEEKDWVKELGDQEEQKLRSDKLYLYYTQKGRCMYSGEVIELKDLWDNTKYDIDHIYPQSKTMDDSLNNRVLVKKKYNATKSDKYPLNENIRHERKGFWKSLLDGGFISKEKYERLIRNTELSPEELAGFIERQIVETRQSTKAVAEILKQVFPESEIVYVKAGTVSRFRKDFELLKVREVNDLHHAKDAYLNIVVGNSYYVKFTKNASWFIKENPGRTYNLKKMFTSGWNIERNGEVAWEVGKKGTIVTVKQIMNKNNILVTRQVHEAKGGLFDQQIMKKGKGQIAIKETDERLASIEKYGGYNKAAGAYFMLVESKDKKGKTIRTIEFIPLYLKNKIESDESIALNFLEKGRGLKEPKILLKKIKIDTLFDVDGFKMWLSGRTGDRLLFKCANQLILDEKIIVTMKKIVKFIQRRQENRELKLSDKDGIDNEVLMEIYNTFVDKLENTVYRIRLSEQAKTLIDKQKEFERLSLEDKSSTLFEILHIFQCQSSAANLKMIGGPGKAGILVMNNNISKCNKISIINQSPTGIFENEIDLLKI

SEQ ID NO: 50 - protein, 984 aa, Campylobacter jejuni
MAKILAFDIGISSIGWAFSENDELKDCGVRIFTKAENPKTGESLALPRRIARSARKRLARRKARLNHLKHLIANEFKLNYEDYQSFDEILAKAYKGSLISPYELRFRALNELLSKQDFARVILHIAKRRGYDDIKNNGDEEKGKILKAIKQNEEKLANYQSVGEYLYKEYFQKFKENSKEFINVRNKKESYERCIAQSFLKDELKLIFKKQREFGFSFSKKFEEEVLSVAFYKRALKDFSHLVGNCSFFTDEKRAPKNSPLAFMFVALTRIINLLNNLKNTLYTKDDLNALLNEVLKNGTLTYKQTKKLLGLSDDYEFKGEKGNYFIEFKKYKEFIKALGEHSLSQDDLNEIAKDITLIKDEIKLKKALAKYDLNENQIDNLSKLEFKDHLNISFKALKLITPLMLEGKKYDEACNELTLKVAINEDKKDFLPAFNETYYKDEVTNPVVLRAIKEYRKVLNALLKKYGKVHKINIELAREVGKNHSQRAKIEKEQNENYKAKKDAELECEKLGLKINSKNILKLRLFKEQKEFCVYSGEKIKLSDLQDEKMLEIDHIYPYSRSFDDSYMNKVLVFTKQNQEKLNQTPFEAFGNDSAKWQKIEVLAKNLPTKKQKRILDKNYKDKEQKDFKDRNLNDTRYIARLVLNYTKDYLDFLPLSDDENTKLNDTQKGSKVHVEAKSGMLTSALRHTWGFSTKDRNNHLHHAIDAVIIAYANNSIVKAFSDFKKEQESNTAELYAKKISELDYKNKRKFFEPFSGFRQKVLDKIDEIFVSKPERKKPSGALHEETFRKEEEFYQSYGGKEGVLKALELGKIRKVNGKIVKNGDMFRVDIFKHKKTNKFYAVPIYTMDFALKVLPNKAVARSKKGEIKDWILMDENYEFCFSLYKDSLILIQTKDMQEPEFVYYNAFTSSTVSLIVSKHDNKFETLSKNQKILFKNANEKEVIAKSIGIQNLKVFEKYIVSALGEVTKAEFRQREEFKNELR

SEQ ID NO: 51 - protein, 1037 aa, Parvibaculum lavamentivorans
MERIFGFDIGTTSIGFSVIDYSSTQSAGNIQRLGVRIFPEARDPDGTPLNQQRRQKRMMRRQLRRRRIRRKALNETLHEAGFLPAYGSADWPVVMADEPYELRRRGLEEGLSAYEFGRAIYHLAQHRHFKGRELEESDTPDPDVDDEKEAANERAATLKALKNEQTTLGAWLARRPPSDRKRGIHAHRNVVAEEFERLWEVQSKFHPALKSEEMRARISDTIFAQRPVFWRKNTLGECRFMPGEPLCPKGSWLSQQRRMLEKLNNLAIAGGNARPLDAEERDAILSKLQQQASMSWPGVRSALKALYKQRGEPGAEKSLKFNLELGGESKLLGNALEAKLADMFGPDWPAHPRKQEIRHAVHERLWAADYGETPDKKRVIILSEKDRKAHREAAANSFVADFGITGEQAAQLQALKLPTGWEPYSIPALNLFLAELEKGERFGALVNGPDWEGWRRTNFPHRNQPTGEILDKLPSPASKEERERISQLRNPTVVRTQNELRKVVNNLIGLYGKPDRIRIEVGRDVGKSKREREEIQSGIRRNEKQRKKATEDLIKNGIANPSRDDVEKWILWKEGQERCPYTGDQIGFNALFREGRYEVEHIWPRSRSFDNSPRNKTLCRKDVNIEKGNRMPFEAFGHDEDRWSAIQIRLQGMVSAKGGTGMSPGKVKRFLAKTMPEDFAARQLNDTRYAAKQILAQLKRLWPDMGPEAPVKVEAVTGQVTAQLRKLWTLNNILADDGEKTRADHRHHAIDALTVACTHPGMTNKLSRYWQLRDDPRAEKPALTPPWDTIRADAEKAVSEIVVSHRVRKKVSGPLHKETTYGDTGTDIKTKSGTYRQFVTRKKIESLSKGELDEIRDPRIKEIVAAHVAGRGGDPKKAFPPYPCVSPGGPEIRKVRLTSKQQLNLMAQTGNGYADLGSNHHIAIYRLPDGKADFEIVSLFDASRRLAQRNPIVQRTRADGASFVMSLAAGEAIMIPEGSKKGIWIVQGVWASGQVVLERDTDADHSTTTRPMPNPILKDDAKKVSIDPIGRVRPSND

SEQ ID NO: 52 - protein, 1107 aa, Eubacterium ventriosum
MGYTVGLDIGVASVGVAVLDENDNIVEAVSNIFDEADTSNNKVRRTLREGRRTKRRQKTRIEDFKQLWETSGYIIPHKLHLNIIELRNKGLTELLSLDELYCVLLSMLKHRGISYLEDADDGEKGNAYKKGLAFNEKQLKEKMPCEIQLERMKKYGKYHGEFIIEINDEKEYQSNVFTTKAYKKELEKIFETQRCNGNKINTKFIKKYMEIYERKREYYIGPGNEKSRTDYGIYTTRTDEEGNFIDEKNIFGKLIGKCSVYPEEYRASSASYTAQEFNLLNDLNNLKINNEKLTEFQKKEIVEIIKDASSVNMRKIIKKVIDEDIEQYSGARIDKKGKEIYHTFEIYRKLKKELKTINVDIDSFTREELDKTMDILTLNTERESIVKAFDEQKFVYEENLIKKLIEFRKNNQRLFSGWHSFSYKAMLQLIPVMYKEPKEQMQLLTEMNVFKSKKEKYVNYKYIPENEVVKEIYNPVVVKSIRTTVKILNALIKKYGYPESVVIEMPRDKNSDDEKEKIDMNQKKNQEEYEKILNKIYDEKGIEITNKDYKKQKKLVLKLKLWNEQEGLCLYSGKKIAIEDLLNHPEFFEIDHIIPKSISLDDSRSNKVLVYKTENSIKENDTPYHYLTRINGKWGFDEYKANVLELRRRGKIDDKKVNNLLCMEDITKIDVVKGFINRNLNDTRYASRVVLNEMQSFFESRKYCNTKVKVIRGSLTYQMRQDLHLKKNREESYSHHAVDAMLIAFSQKGYEAYRKIQKDCYDFETGEILDKEKWNKYIDDDEFDDILYKERMNEIRKKIIEAEEKVKYNYKIDKKCNRGLCNQTIYGTREKDGKIHKISSYNIYDDKECNSLKKMINSGKGSDLLMYNNDPKTYRDMLKILETYSSEKNPFVAYNKETGDYFRKYSKNHNGPKVEKVKYYSGQINSCIDISHKYGHAKNSKKVVLVSLNPYRTDVYYDNDTGKYYLVGVKYNHIKCVGNKYVIDSETYNELLRKEGVLNSDENLEDLNSKNITYKFSLYKNDIIQYEKGGEYYTERFLSRIKEQKNLIETKPINKPNFQRKNKKGEWENTRNQIALAKTKYVGKLVTDVLGNCYIVNMEKFSLVVDK

SEQ ID NO: 53 - protein, 1136 aa, Streptococcus gordonii
MNGLVLGLDIGIASVGVGILEKDTGKIIHASSRLFPAATADNNVERRSNRQGRRLNRRKKHRSVRLQDLFEGYGLLTDFSKVSMNLNPYQLRVQGMENQLTNEELFVALKNIVKRRGISYLDDASEDGGTVSSDYGKAVEENRKLLAEKTPGQIQLERFEKYGQLRGDFTVEENGEKHRLINVFSTSAYRKEAERILRKQQEFNSKITDEFIEDYLIILTGKRKYYHGPGNEKSRTDYGRFRTDGTTLDNIFGILIGKCTFYTEEYRASKASYTAQEFNLLNDLNNLTVPTETKKLSEEQKKLIIEYAKSAKTLGASTLLKYIAKMIDASVDQIRGYRVDVNNKPEMHTFEVYRKMQSLETIKVEELPRKVLDELAHILTLNTEREGIEEAINSKLKDIFNRDQVLELVQFRKNNSSLFSKGWHNFSIKLMMELIPELYETSEEQMTILTRLGKQRSKETSKRTKYIDEKELTEEIYNPVVAKSVRQAIKIINEATKKYGIFDNIVIEMARENNEEDAKKDYIKRQKANQDEKNAAMEKAAFQYNGKKELPDNIFHGHKELTTKIRLWHQQGEKCLYTGKNIPISDLIHNQYKYEIDHILPLSLSFDDSLSNKVLVLATANQEKGQRTPFQALDSMDDAWSYREFKSYVKDSKLLSNKKKDYLLTEEDISKIEVKQKFIERNLVDTRYSSRVVLNALQDFYKSHQLDTTISVVRGQFTSQLRRKWGIEKSRETYHHHAVDALIIAASSQLRLWKKHSNPLIAYKEGQFVDSETGEIVSLSDEEYKELVFKAPYDHFVDTLRSKKFEDSILFSYQVDSKYNRKISDATIYATRKAKLDKEKKEYTYTLGKIKDIYALGTKTPSKTGFYKFLDLYKTDKSQFLMYQKDRKTWDEVIEKIIEQYRPFKEYDKNGKEVDFNPFEKYRIGNGPIRKYSKKGNGPEIKSLKYYDILLGKHKNITPDGSRNTVALLSLNPWRTDVYYNSETKKYEFLGLKYADLCFEEGGAYGISEVKYKKIREKEGIGKNSEFKFTLYKNDLILIKDTETNCQQFFRFWSRTGKDNPKSFEKHKIELKPYEKAKFEKGEELKVLGKVPPSSNQFQKNMQIENLSIYKVKTDILGNKHFIKKEGDEPKLKFKK

SEQ ID NO: 54 - protein, 984 aa, Campylobacter jejuni
MARILAFDIGISSIGWAFSENDELKDCGVRIFTKAENPKTGESLALPRRLARSARKRLARRKARLNHLKHLIANEFKLNYEDYQSFDESLAKAYKGSLISPYELRFRALNELLSKQDFARVILHIAKRRGYDDIKNNGDEEKSEILKAIKQNEEKLVNYQSVGEYLYKEYFQKFKENSKEFINVRNKKESYERCITQSFLKDELKLIFQKQREFGFSFSKKFEEEVLSVAFYKRALKDFSHLVGNCSFFTDEKRAPKNSPLAFMFVALTRIINILNNLKNTEGILYTKDDLNALLNEVLKNGTLTYKQTKKLLGLSDDYEFKGEKGTYFIEFKKYKEFIKALGEHNLSQDDLNEIAKDITLIKDEIKLKKALAKYDLNQNQIDSLSKLEFKDHLNISFKALKLITPLMLEGKKYDEACNELNLKVAINEDKKDFLPAFNETYYKDEVTNPVVLRAIKEYRKILNALLKKYGKVHKINIELAREVGKNHSQRAKIEKEQNENYKAKKDAEIECEKLGLKINSKNILKLRLFKEQKEFCAYSGEKIKLSDLQDEKMLEIDHIYPYSRSFDDSYMNKVLVFTKQNQEKLNKTPFEAFGNDSTKWQKIEVLAKNLPEKKQKRILDKNYKDKEQKDFKDRNLNDTRYIARLVLNYTKDYLDFLPLSDDENTKLNDTQKGSKVHVEAKSGMLTSALRHTWGFSAKDRNNHLHHAIDAAIIAYANNSIVKAFSDFKKEQESNSVELYAKKISELDYKNKRKFFEPFSGFRQKVLDKIDEIFVSKPERKKPSGALHEETFRKEEEFYQSYGGKEGVLKALELGKIRKVNGKIVKNGDMFRVDIFKHKKTNKFYAVPIYTMDFALKVLPNKAVARSKKGEIKDWILMDENYEFCFSLYKDSLILIQTKDMQEPELVYFNAFTSSTVSLIVSKHDNKFETLSKNQKILFKNANEKEVIAKSIGIQNLKVFEKYIVSALGEVTKAEFRQREDFKK

SEQ ID NO: 55 - protein, 1079 aa, Dinoroseobacter shibae
MRLGLDIGTSSIGWWLYETDGAGSDARITGVVDGGVRIFSDGRDPKSGASLAVDRRAARAMRRRRDRYLRRRATLMKVLAETGLMPADPAEAKALEALDPFALRAAGLDEPLPLPHLGRALFHLNQRRGFKSNRKTDRGDNESGKIKDATARLDMEMMANGARTYGEFLHKRRQKATDPRHVPSVRTRLSIANRGGPDGKEEAGYDFYPDRRHLEEEFHKLWAAQGAHHPELTETLRDLLFEKIFFQRPLKEPEVGLCLFSGHHGVPPKDPRLPKAHPLTQRRVLYETVNQLRVTADGREARPLTREERDQVIHALDNKKPTKSLSSMVLKLPALAKVLKLRDGERFTLETGVRDAIACDPLRASPAHPDRFGPRWSILDADAQWEVISRIRRVQSDAEHAALVDWLTEAHGLDRAHAEATAHAPLPDGYGRLGLTATTRILYQLTADVVTYADAVKACGWHHSDGRTGECFDRLPYYGEVLERHVIPGSYHPDDDDITRFGRITNPTVHIGLNQLRRLVNRIIETHGKPHQIVVELARDLKKSEEQKRADIKRIRDTTEAAKKRSEKLEELEIEDNGRNRMLLRLWEDLNPDDAMRRFCPYTGTRISAAMIFDGSCDVDHILPYSRTLDDSFPNRTLCLREANRQKRNQTPWQAWGDTPHWHAIAANLKNLPENKRWRFAPDAMTRFEGENGFLDRALKDTQYLARISRSYLDTLFTKGGHVWVVPGRFTEMLRRHWGLNSLLSDAGRGAVKAKNRTDHRHHAIDAAVIAATDPGLLNRISRAAGQGEAAGQSAELIARDTPPPWEGFRDDLRVRLDRIIVSHRADHGRIDHAARKQGRDSTAGQLHQETAYSIVDDIHVASRTDLLSLKPAQLLDEPGRSGQVRDPQLRKALRVATGGKTGKDFENALRYFASKPGPYQAIRRVRIIKPLQAQARVPVPAQDPIKAYQGGSNHLFEIWRLPDGEIEAQVITSFEAHTLEGEKRPHPAAKRLLRVHKGDMVALERDGRRVVGHVQKMDIANGLFIVPHNEANADTRNNDKSDPFKWIQIGARPAIASGIRRVSVDEIGRLRDGGTRPI

SEQ ID NO: 56 - protein, 1096 aa, Eubacterium dolichum
MMEVFMGRLVLGLDIGITSVGFGIIDLDESEIVDYGVRLFKEGTAAENETRRTKRGGRRLKRRRVTRREDMLHLLKQAGIISTSFHPLNNPYDVRVKGLNERLNGEELATALLHLCKHRGSSVETIEDDEAKAKEAGETKKVLSMNDQLLKSGKYVCEIQKERLRTNGHIRGHENNFKTRAYVDEAFQILSHQDLSNELKSAIITIISRKRMYYDGPGGPLSPTPYGRYTYFGQKEPIDLIEKMRGKCSLFPNEPRAPKLAYSAELFNLLNDLNNLSIEGEKLTSEQKAMILKIVHEKGKITPKQLAKEVGVSLEQIRGFRIDTKGSPLLSELTGYKMIREVLEKSNDEHLEDHVFYDEIAEILTKTKDIEGRKKQISELSSDLNEESVHQLAGLTKFTAYHSLSFKALRLINEEMLKTELNQMQSITLFGLKQNNELSVKGMKNIQADDTAILSPVAKRAQRETFKVVNRLREIYGEFDSIVVEMAREKNSEEQRKAIRERQKFFEMRNKQVADIIGDDRKINAKLREKLVLYQEQDGKTAYSLEPIDLKLLIDDPNAYEVDHIIPISISLDDSITNKVLVTHRENQEKGNLTPISAFVKGRFTKGSLAQYKAYCLKLKEKNIKTNKGYRKKVEQYLLNENDIYKYDIQKEFINRNLVDTSYASRVVLNTLTTYFKQNEIPTKVFTVKGSLTNAFRRKINLKKDRDEDYGHHAIDALIIASMPKMRLLSTIFSRYKIEDIYDESTGEVFSSGDDSMYYDDRYFAFIASLKAIKVRKFSHKIDTKPNRSVADETIYSTRVIDGKEKVVKKYKDIYDPKFTALAEDILNNAYQEKYLMALHDPQTFDQIVKVVNYYFEEMSKSEKYFTKDKKGRIKISGMNPLSLYRDEHGMLKKYSKKGDGPAITQMKYFDGVLGNHIDISAHYQVRDKKVVLQQISPYRTDFYYSKENGYKFVTIRYKDVRWSEKKKKYVIDQQDYAMKKAEKKIDDTYEFQFSMHRDELIGITKAEGEALIYPDETWHNFNFFFHAGETPEILKFTATNNDKSNKIEVKPIHCYCKMRLMPTISKKIVRIDKYATDVVGNLYKVKKNTLKFEFD

SEQ ID NO: 57 - protein, 1082 aa, Neisseria meningitidis
MAAFKPNPINYILGLDIGIASVGWAMVEIDEDENPICLIDLGVRVFERAEVPKTGDSLAMARRLARSVRRLTRRRAHRLLRARRLLKREGVLQAADFDENGLIKSLPNTPWQLRAAALDRKLTPLEWSAVLLHLIKHRGYLSQRKNEGETADKELGALLKGVADNAHALQTGDFRTPAELALNKFEKESGHIRNQRGDYSHTFSRKDLQAELNLLFEKQKEFGNPHISDGLKEGIETLLMTQRPALSGDAVQKMLGHCTFEPAEPKAAKNTYTAERFIWLTKLNNLRILEQGSERPLTDTERTTLIDEPYRKSKLTYAQARKLLELDNTAFFKGLRYGKDNAEASTLMEMKAYHAISRALEKEGLKDKKSPLNLSPELQDEIGTAFSLFKTDEDITGRLKDRVQPEILEALLKHISFDKFVQISLKALRRIVPLMEQGKRYDEACAEIYGDHYGKKNTEEKIDLPPIPADEIRNPVVLRALSQARKVINGVVRRYGSPARIHIETAREVGKSFKDRKEIEKRQEENRKDREKAATKFREYFPNFVGEPKSKDILKLRLYEQQHGKCLYSGKEINLGRLNEKGYVEIDHALPFSRTWDDSFNNKVLVLGSENQNKGNQTPYEYFNGKDNSREWQEFKARVETSRFPRSKKQRILLQKFDEEGFKERNLNDTRYVNRFLCQFVADHMLLTGKGKRRVFASNGQITNLLRGFWGLRKVRAENDRHHALDAVVVACSTVAMQQKITRFVRYKEMNAFDGKTIDKETGEVLHQKTHFPQPWEFFAQEVMIRVFGKPDGKPEFEEADTPEKLRTLLAEKLSSRPEAVHEYVTPLFVSRAPNRKMSGQGHMETVKSAKRLDEGVSVLRVPLTQLKLKDLEKMVNREREPKLYEALKARLEAHKDDPAKAFAEPFYKYDKAGNRTQQVKAVRVEQVQKTGVWVRNHNGIADNATMVRVDVFEKGDKYYLVPIYSWQVAKGILPDRAVVQGKDEEDWQLIDDSFNFKFSLHPNDLVEVITKKARMFGYFASCHRGTGNINIRIHDLDHKIGKNGILEGIGVKTALSFQKYQIDELGKEIRPCRLKKRPPVR

SEQ ID NO: 58 - protein, 1050 aa, Gluconacetobacter diazotrophicus
MGENMIDESLTFGIDLGIGSCGWAVLRRPSAFGRKGVIEGMGSWCFDVPETSKERTPTNQIRRSNRLLRRVIRRRRNRMAAIRRLLHAAGLLPSTDSDALKRPGHDPWELRARGLDKPLKPVEFAVVLGHIAKRRGFKSAAKRKATNISSDDKKMLTALEATRERLGRYRTVGEMFARDPDFASRRRNREGKYDRTTARDDLEHEVHALFAAQRRLGQGFASPELEEAFTASAFHQRPMQDSERLVGFCPFERTEKRAAKLTPSFERFRLLARLLNLRITTPDGERPLTVDEIALVTRDLGKTAKLSIKRVRTLIGLEDNQRFTTIRPEDEDRDIVARTGGAMTGTATLRKALGEALWTDMQERPEQLDAIVQVLSFFEANETITEKLREIGLTLAVLDVLLTALDAGVFAKFKGAAHISTKAARNLLPHLEQGRRYDEACTMAGYDHAASRLSHHGQIVAKTQFNALVTEIGESIANPIARKALIEGLKQIWAMRNHWGLPGSIHVELARDVGNSIEKRREIEKHIEKNTALRARERREVHDLLDLEDVNGDTLLRYRLWKEQGGKCLYTGKAIHIRQIAATDNSVQVDHILPWSRFGDDSFNNKTLCLASANQQKKRSTPYEWLSGQTGDAWNAFVQRIETNKELRGFKKRNYLLKNAKEAEEKFRSRNLNDTRYAARLFAEAVKLLYAFGERQEKGGNRRVFTRPGALTAALRQAWGVESLKKQDGKRINDDRHHALDALTVAAVDEAEIQRLTKSFHEWEQQGLGRPLRRVEPPWESFRADVEATYPEVFVARPERRRARGEGHAATIRQVKERECTPIVFERKAVSSLKEADLERIKDGERNEAIVEAIRSWIATGRPADAPPRSPRGDIITKIRLATTIKAAVPVRGGTAGRGEMVRADVFSKPNRRGKDEWYLVPVYPHQIMNRKAWPKPPMRSIVANKDEDEWTEVGPEHQFRFSLYPRSNIEIIRPSGEVIEGYFVGLHRNTGALTISAHNDPKSIHSGIGTKTLLAISKYQVDRFGRKSPVRKEVRTWHGEACISPTPPG

SEQ ID NO: 59 - protein, 1391 aa, Kordia algicida
MKKILGLDLGTNSIGWALVNEAEHEHEQSSIVKLGVRVNPLSVDEKTNFEKGRPLSINADRTSKRSARRNLQRFKLRRKNLINLLLKHHIISNETILTEVGKNTTHQTLKLRSKATQEKISLEEFARILLSINKKRGYKSSRKEKNEDEGFTIDGMAIAKELYDNQLTPGQYVYNILQDGKNYIPDFYRSDLQAEFDDVWQFQKKFYSSILTDEFYLKLKGQGKENTRKLFLAIHQVYTAENKGKRDAVKLQYYKWRSEAVKKQLSIEEVAYVLVEINNNINKSSGYLGAISDRSKALYFNNETVGEYLYGQLVKNRHNSLRNQVFYRQDYLDEFEKIWETQAKFYDELTNELKQEIRDVVIFYQRKLKSQKHLISDCLFEKHHKAIPKSSPLFQEFKIWQNLNYLEFVHTQSKEKIFFSELDDETRQFVFAELNIRGTLKIKEIKKLIGLETPVYWKSNFDEIEGNRTNQVLYNVYQNIADDLGYGFDWSKKHAFEINAELQAIFKDVGIDTAILNFDASIEENDFDKQKSYQLWHLLYSAEDTDKATEEDKLIYGNINTKLKKQLHQKYGFEAKYGNLLANISLQQDYGNLSAKAIKKILPYLESGNSFYEACTIVGYNPSNSLTKEQQQNRKLKDKLELLPKNSLRNPVVEKILNQKVNLINQLIDEYGKPDEVRIELARELKKSAKQRADLSKHINDATLKNQNIRKTLQKDFGIQNPSKNDVIRYKLYDELKDNGYKTLFTNKYIPKEQLFSKDVDIEHIIPKAILFDDSFSNKTLAYRNVNLAKADATAFDFISSKHLDDLDNYKARVETLFQSKRISKGKYKKLLMTRQNLPEDFIERDLRNSQYIAKKATAMLKEVFRSVVPTSGRITDKLREDWDLVNVMKELNLPKYRTLGLTEFIERKNGNKIEQIIDWTKRNDHRHHAMDALTVAFTTHNHIQYLNNLNVTHGLNGVDTDHEKSRLYAIKQAITKVYIVGKTKKRKFIPPMENFRSHAKNHLEGILISFKNKNKVVTKNKNRTKTKTKGVFNEKIQLTPRGQLHKETIYGHAKKVIVTKEKVSSKFTHEKILQVTKPAYREALLKRLASFKNDPKKAFSGKNALSKNPLYFDITSGKKVPDTVKLSYFENSYVIRKEVNSDNFKNEKSLQKVLDVGIRRILEKRLADYNGNAKEAFSNLEKNPIWKDKEKGVCIKKVRIEALKNAEPLHVKKDHLGKIILDDENKSTPVDFISTGNNHHVAIYEDKDGKLHDKVVSFYEVVSRVNLGLPIIDKSFNSHLDWKFLFSMKQNEMFVFPSEDFNPKEIDIGNPKNNELISKYLFRVQKFSKVTYGNSAVRDYVFRHHLETELIDKKELKGITYYQLKSIGMLEKLVKVRINHIGKIVHIGEY

SEQ ID NO: 60 - protein, 1116 aa, Clostridium spiroforme
MVEFLLKEMKIMGRLVLGLDIGITSVGYGVIDIDKNEFVDYGVRLFKEGTAINNEERRSKRGARRLKRRKTNRIADMKKLLERNGLIDEQYTALNNPYEIRKKGLKNKLSNYELATAILHITKNRGTCLESNADETQDEESTKNILSKNALELKDKYICEIQLARLEESGKIRGINNNFKTEDYLKELSKILENQDLEKETIDKIKEIVARRRRYDQGPGSEKSPTPYGSYRMENGELVHVNLIDMMRGKCSVFPDQLRAPQQSYSAELFNLLNDLNNLKINGEKLSSTEKQKIIDFVNEKGGITVKQLLKLIDVGITEISGFRIDKNEKPLITEFKGYKKVLKVFKNYNQESLLNDKSIVDTIMDINTKIKSIDERSDQLKQVLPSLDTSIINDLASIKGVSGYHSLSLKALNLINNEMLKTEMNQMQVLHQLDIFDKNRVSLKGQRQIYADDNAILSPVAKRAHRETFKVINKLRSIYGEFDSIVIETTRDKNTQDQKKRIKNNQKNYEERNTEVNNFLKEAGYNPENINAKTKMKIRLYIEQDAKSAYTLQDINLKELIEDEKAYEIDHIIPISISLDDSFNNKVLTTHDENQEKGNLTPISAFLKGKFHNGNLNTYKVFIQNNKNLNRKKKEYLLCEDDITRYEVVQNFINRNLVDTSYACRTVMNTLVHYFKDNEINTKVHTIKGQATSTFRKRIGLIKDREEDYFHHAIDALIVASLKKMNLINSYLMKVDFNEMYDEETGEIFNVLPDNSYLDEKYISFVSNLKNIYEESNKYIRGVMIKEKMTYPLIKVSHKIDTKPNRKISDDTIYSTRNVDNQDMLVERIKNIYDPKENAANTLINDIINDNTDKYIMYHKDPQTFDKIKAIVLNHFNEFKTDKNCYIVTKEGLYKLKGTSPLALYYEEFGPITKYAKKNNGPTIHSMKFYSEKLGNHLSITHKYSTVNKKVITKQISPYRTDFYQSPEGKYKFVTVRYKDVAYNAKKDKYIIDHSWYREQKKLKKIADEWIFVCSVHRDELIGIMKADGQKRIFDSSTESDGETLYHDAKTYEILKFTATNNDITGRFEVKPIYCYCKKQLMVSIGTCRKIQKFATDVLGNLYIVKDNVLKLEFK

SEQ ID NO: 61 - protein, 1348 aa, Finegoldia magna
MKSEKKYYIGLDVGTNSVGWAVTDEFYNILRAKGKDLWGVRLFEKADTAANTRIFRSGRRRNDRKGMRLQILREIFEDEIKKVDKDFYDRLDESKFWAEDKKVSGKYSLFNDKNFSDKQYFEKFPTIFHLRKYLMEEHGKVDIRYYFLAINQMMKRRGHFLIDGQISHVTDDKPLKEQLILLINDLLKIELEEELMDSIFEILADVNEKRTDKKNNLKELIKGQDFNKQEGNILNSIFESIVTGKAKIKNIISDEDILEKIKEDNKEDFVLTGDSYEENLQYFEEVLQENITLFNTLKSTYDFLILQSILKGKSTLSDAQVERYDEHKKDLEILKKVIKKYDEDGKLFKQVFKEDNGNGYVSYIGYYLNKNKKITAKKKISNIEFTKYVKGILEKQCDCEDEDVKYLLGKIEQENFLLKQISSINSVIPHQIHLFELDKILENLAKNYPSFNNKKEEFTKIEKIRKTFTFRIPYYVGPLNDYHKNNGGNAWIFRNKGEKIRPWNFEKIVDLHKSEEEFIKRMLNQCTYLPEETVLPKSSILYSEYMVLNELNNLRINGKPLDTDVKLKLIEELFKKKTKVTLKSIRDYMVRNNFADKEDFDNSEKNLEIASNMKSYIDFNNILEDKFDVEMVEDLIEKITIHTGNKKLLKKYIEETYPDLSSSQIQKIINLKYKDWGRLSRKLLDGIKGTKKETEKTDTVINFLRNSSDNLMQIIGSQNYSFNEYIDKLRKKYIPQEISYEVVENLYVSPSVKKMIWQVIRVTEEITKVMGYDPDKIFIEMAKSEEEKKTTISRKNKLLDLYKAIKKDERDSQYEKLLTGLNKLDDSDLRSRKLYLYYTQMGRDMYTGEKIDLDKLFDSTHYDKDHIIPQSMKKDDSIINNLVLVNKNANQTTKGNIYPVPSSIRNNPKIYNYWKYLMEKEFISKEKYNRLIRNTPLTNEELGGFINRQLVETRQSTKAIKELFEKFYQKSKIIPVKASLASDLRKDMNTLKSREVNDLHHAHDAFLNIVAGDVWNREFTSNPINYVKENREGDKVKYSLSKDFTRPRKSKGKVIWTPEKGRKLIVDTLNKPSVLISNESHVKKGELFNATIAGKKDYKKGKIYLPLKKDDRLQDVSKYGGYKAINGAFFFLVEHTKSKKRIRSIELFPLHLLSKFYEDKNTVLDYAINVLQLQDPKIIIDKINYRTEIIIDNFSYLISTKSNDGSITVKPNEQMYWRVDEISNLKKIENKYKKDAILTEEDRKIMESYIDKIYQQFKAGKYKNRRTTDTIIEKYEIIDLDTLDNKQLYQLLVAFISLSYKTSNNAVDFTVIGLGTECGKPRITNLPDNTYLVYKSITGIYEKRIRIK

SEQ ID NO: 62 - protein, 1129 aa, Streptococcus infantarius
MSNGKILGLDIGVASVGVGIIDSKTGNVIHANSRLFSAANAENNAERRGFRGARRLTRRKKHRVKRVRDLFEKYDISTDFRNLNLNPYELRVKGLTEQLTNEELFAALRTIAKRRGISYLDDAEDDSTGSSDYAKSIDENRRLLKTKTPGQIQLERLEKYGQLRGNFTVYDENGEAHRLINVFSTSDYKNEARKILETQSNYNKQITDEFIEDYIEILTQKRKYYHGPGNEKSRTDYGRFRTDGTTLENIFGILIGKCSFYPEEYRASKASYTAQEFNFLNDLNNLKVPTETGKLSTEQKEYLVDFAKKSKALGASKLLKEIAKIVDCSVDDIKGYRVDNKDKPDLHTFEPYRKLKFNLSSIDIDELSRETLDKLADILTLNTEREGIEDAIKRNLPSQFTEEQISEIVQIRKNQSSAFNKGWHSFSAKLMNELIPELYVTSEEQMTILTRLEKFKVNKKSSKNTKTIDEKEITDEIYNPVVAKSVRQTIKIINAAVKKYGDFDKIVIEMPRDKNAEDEKKFIDKKQKENKKEKDDSLKRAAFLYNGTDNLPDGVFHGNKELKTKIRLWYQQGERCLYSGKLISIHDLVHNSNKFEIDHILPLSLSFDDSLANKVLVYAWTNQEKGQKTPYQVIDSMDTAWSFREMKDYVLKQKGLGKKKCEYLLTTENIDKIEVKKKFIERNLVDTRYASRVVLNSLQTALKELGKDTKVSVVRGQFTSQLRRKWNIDKSRETYHHHAVDALIIAASSQLKLWQKQENPMFESYGENQVVNKETGEILSISDDKYKELVFQPPYQGFVNTISSKGFEDEILFSYQVDSKFNRKVSDATIYSTRKAKLGKDKKDETYVLGKIKDIYSQDGFDTFIKRYKKDKTQFLMYQKDPLTWENVIEVILRDYPSEKLSEDGKKTVKCNPFEEYRRENGLICKYSKKGNGTPIKSLKYYDKKLGNCIDITPEKSKNRVVLRQISPWRADIYFNLETLKYELMGLKYSDLSFEKGTGKYHISQEKYDAIREKEGIGKKSEFKFTLYRNDLILIKDTLNNCERMLRFGSKNDTSKHYVELKPLEKGTFDSEEEILPVLGKVAKSGQFIKGLNKPNISIYKVRTDVLGNKFFIKKEGDKPKLDFKNNNK

SEQ ID NO: 63 - protein, 1065 aa, Clostridium perfringens
MNKDINYALGLDIGITSVGWAVINLDLNRIEDLGVRIFNAAENLKDGSSLALPRRLARGRRRLLRRKAYRVERVRKLILKNNILTKEELEGLFKNKEVIDVWEARVKGLDYKLSREEWAKILINFCKRRGFKSNRKNEAKDKEAGQILSSISYNIEKMKETNSRTIGEYIYNEVKNSEDSYAPLRNKFGEYKMCVSRDVIREEIHTLFEKQRELGNNFASDEIEDKYFEIFNSQRPFSNFEDLEKLVGFCTFERKKHKRAPKHCISSEEFTLYEGINKLSIIKDGEKRKLSEEERTLVVNEAFNKKEIKYTTLRKLLGLSEEELFSTLTYSIDKDISKTENTKFVSLKGYHEIKRAIEKGVSKKAWQDIENNRNLLNDIAYVLTLGKTDDEIEKQLRLRNVPEELFESLLDMSFNKFNNLSIYALEKILPFMKEGYQYNEACEKAGYNFKAIYEGVRTKKLPVIEIDEIVNPVVNRALAQTRKVINSVIDKYGSPVRINIELARDLAKNFKDRKLIEKEQKENRANLDKIRENLRELMDKEPTVVEVLKYRLWEQQRGECAYTQSQIPLERLFSPGYCEIDHIIPFSRSFDDSLSNKILVLGSENQRKGNRTPYEYFGEDSERWNSFEIWVKGSYLNYKKKANLLKKKFSEEEQRDWKARNLQDTKYICRYISNFVNNRLEFKESENKQKVITVNGRATAYLRSRWGLNKVREDGDKHHALDAAVVGVTTQGMVQKISKYSKAHELYTVRKNDEFVDVETGECVDVDEYKEIRKDILPRPWRGFSEELKLRLSDNPLEELKKSPIETYNEEFIKENVKPIFVSRVPFRKISGKLFKETIYSERAFKDGYFVSKKSLVDLKRGDLDNFYNYECDKKLYDAISERMKEFNYNGKKAFESPFRKPTKSGKEGPVVRSVKIKSAVPFKDGIPMNEGLVAKEGMVRIDIYEKEGKYFVVPVYRYQLAKGIVPKRAAIAKKDELKWPIMDQTYNFKFSIYKNDLIEVKYDKKGVYFGYYDGFDRNSASLTIEKHDNSERYRSIGLKVGVLEINKYEVDVLGNYHKVKLGGN

SEQ ID NO: 64 - protein, 1195 aa, Elusimicrobium minutum
MQKNINTKQNHIYIKQAQKIKEKLGDKPYRIGLDLGVGSIGFAIVSMEENDGNVLLPKEIIMVGSRIFKASAGAADRKLSRGQRNNHRHTRERMRYLWKVLAEQKLALPVPADLDRKENSSEGETSAKRFLGDVLQKDIYELRVKSLDERLSLQELGYVLYHIAGHRGSSAIRTFENDSEEAQKENTENKKIAGNIKRLMAKKNYRTYGEYLYKEFFENKEKHKREKISNAANNHKFSPTRDLVIKEAEAILKKQAGKDGFHKELTEEYIEKLTKAIGYESEKLIPESGFCPYLKDEKRLPASHKLNEERRLWETLNNARYSDPIVDIVTGEITGYYEKQFTKEQKQKLFDYLLTGSELTPAQTKKLLGLKNTNFEDIILQGRDKKAQKIKGYKLIKLESMPFWARLSEAQQDSFLYDWNSCPDEKLLTEKLSNEYHLTEEEIDNAFNEIVLSSSYAPLGKSAMLIILEKIKNDLSYTEAVEEALKEGKLTKEKQAIKDRLPYYGAVLQESTQKIIAKGFSPQFKDKGYKTPHTNKYELEYGRIANPVVHQTLNELRKLVNEIIDILGKKPCEIGLETARELKKSAEDRSKLSREQNDNESNRNRIYEIYIRPQQQVIITRRENPRNYILKFELLEEQKSQCPFCGGQISPNDIINNQADIEHLFPIAESEDNGRNNLVISHSACNADKAKRSPWAAFASAAKDSKYDYNRILSNVKENIPHKAWRFNQGAFEKFIENKPMAARFKTDNSYISKVAHKYLACLFEKPNIICVKGSLTAQLRMAWGLQGLMIPFAKQLITEKESESFNKDVNSNKKIRLDNRHHALDAIVIAYASRGYGNLLNKMAGKDYKINYSERNWLSKILLPPNNIVWENIDADLESFESSVKTALKNAFISVKHDHSDNGELVKGTMYKIFYSERGYTLTTYKKLSALKLTDPQKKKTPKDFLETALLKFKGRESEMKNEKIKSAIENNKRLFDVIQDNLEKAKKLLEEENEKSKAEGKKEKNINDASIYQKAISLSGDKYVQLSKKEPGKFFAISKPTPTTTGYGYDTGDSLCVDLYYDNKGKLCGEIIRKIDAQQKNPLKYKEQGFTLFERIYGGDILEVDFDIHSDKNSFRNNTGSAPENRVFIKVGTFTEITNNNIQIWFGNIIKSTGGQDDSFTINSMQQYNPRKLILSSCGFIKYRSPILKNKEG

SEQ ID NO: 65 - protein, 1101 aa, Akkermansia muciniphila
MSRSLTFSFDIGYASIGWAVIASASHDDADPSVCGCGTVLFPKDDCQAFKRREYRRLRRNIRSRRVRIERIGRLLVQAQIITPEMKETSGHPAPFYLASEALKGHRTLAPIELWHVLRWYAHNRGYDNNASWSNSLSEDGGNGEDTERVKHAQDLMDKHGTATMAETICRELKLEEGKADAPMEVSTPAYKNLNTAFPRLIVEKEVRRILELSAPLIPGLTAEIIELIAQHHPLTTEQRGVLLQHGIKLARRYRGSLLFGQLIPRFDNRIISRCPVTWAQVYEAELKKGNSEQSARERAEKLSKVPTANCPEFYEYRMARILCNIRADGEPLSAEIRRELMNQARQEGKLTKASLEKAISSRLGKETETNVSNYFTLHPDSEEALYLNPAVEVLQRSGIGQILSPSVYRIAANRLRRGKSVTPNYLLNLLKSRGESGEALEKKIEKESKKKEADYADTPLKPKYATGRAPYARTVLKKVVEEILDGEDPTRPARGEAHPDGELKAHDGCLYCLLDTDSSVNQHQKERRLDTMTNNHLVRHRMLILDRLLKDLIQDFADGQKDRISRVCVEVGKELTTFSAMDSKKIQRELTLRQKSHTDAVNRLKRKLPGKALSANLIRKCRIAMDMNWTCPFTGATYGDHELENLELEHIVPHSFRQSNALSSLVLTWPGVNRMKGQRTGYDFVEQEQENPVPDKPNLHICSLNNYRELVEKLDDKKGHEDDRRRKKKRKALLMVRGLSHKHQSQNHEAMKEIGMTEGMMTQSSHLMKLACKSIKTSLPDAHIDMIPGAVTAEVRKAWDVFGVFKELCPEAADPDSGKILKENLRSLTHLHHALDACVLGLIPYIIPAHHNGLLRRVLAMRRIPEKLIPQVRPVANQRHYVLNDDGRMMLRDLSASLKENIREQLMEQRVIQHVPADMGGALLKETMQRVLSVDGSGEDAMVSLSKKKDGKKEKNQVKASKLVGVFPEGPSKLKALKAAIEIDGNYGVALDPKPVVIRHIKVFKRIMALKEQNGGKPVRILKKGMLIHLTSSKDPKHAGVWRIESIQDSKGGVKLDLQRAHCAVPKNKTHECNWREVDLISLLKKYQMKRYPTSYTGTPR

SEQ ID NO: 66 - protein, 1187 aa, Bifidobacterium longum
MLSRQLLGASHLARPVSYSYNVQDNDVHCSYGERCFMRGKRYRIGIDVGLNSVGLAAVEVSDENSPVRLLNAQSVIHDGGVDPQKNKEAITRKNMSGVARRTRRMRRRKRERLHKLDMLLGKFGYPVIEPESLDKPFEEWHVRAELATRYIEDDELRRESISIALRHMARHRGWRNPYRQVDSLISDNPYSKQYGELKEKAKAYNDDATAAEEESTPAQLVVAMLDAGYAEAPRLRWRTGSKKPDAEGYLPVRLMQEDNANELKQIFRVQRVPADEWKPLFRSVFYAVSPKGSAEQRVGQDPLAPEQARALKASLAFQEYRIANVITNLRIKDASAELRKLTVDEKQSIYDQLVSPSSEDITWSDLCDFLGFKRSQLKGVGSLTEDGEERISSRPPRLTSVQRIYESDNKIRKPLVAWWKSASDNEHEAMIRLLSNTVDIDKVREDVAYASAIEFIDGLDDDALTKLDSVDLPSGRAAYSVETLQKLTRQMLTTDDDLHEARKTLFNVTDSWRPPADPIGEPLGNPSVDRVLKNVNRYLMNCQQRWGNPVSVNIEHVRSSFSSVAFARKDKREYEKNNEKRSIFRSSLSEQLRADEQMEKVRESDLRRLEAIQRQNGQCLYCGRTITFRTCEMDHIVPRKGVGSTNTRTNFAAVCAECNRMKSNTPFAIWARSEDAQTRGVSLAEAKKRVTMFTFNPKSYAPREVKAFKQAVIARLQQTEDDAAIDNRSIESVAWMADELHRRIDWYFNAKQYVNSASIDDAEAETMKTTVSVFQGRVTASARRAAGIEGKIHFIGQQSKTRLDRRHHAVDASVIAMMNTAAAQTLMERESLRESQRLIGLMPGERSWKEYPYEGTSRYESFHLWLDNMDVLLELLNDALDNDRIAVMQSQRYVLGNSIAHDATIHPLEKVPLGSAMSADLIRRASTPALWCALTRLPDYDEKEGLPEDSHREIRVHDTRYSADDEMGFFASQAAQIAVQEGSADIGSAIHHARVYRCWKTNAKGVRKYFYGMIRVFQTDLLRACHDDLFTVPLPPQSISMRYGEPRVVQALQSGNAQYLGSLVVGDEIEMDFSSLDVDGQIGEYLQFFSQFSGGNLAWKHWVVDGFFNQTQLRIRPRYLAAEGLAKAFSDDVVPDGVQKIVTKQGWLPPVNTASKTAVRIVRRNAFGEPRLSSAHHMPCSWQWRHE

SEQ ID NO: 67 - protein, 166 aa, uncultured Termite
MNKVQEIEYKKIREKLADREYRIGLDLGVGSIGYVVVSLKECNDLSYLPEDIILSGSRIFKSSIGAVERREFRLQRNSHRHHRERMRFLWQLLAEKQLALQSSKDLEKKENSADCETSQKRFPINILKEDPYILRYKALEEKLSLFQLGYVLYHIANHSNTAYENT

SEQ ID NO: 68 - protein, 1032 aa, uncultured Termite
MLYHIANHRGTDSVRSFLEYDDDKIKENTLTAKIAKETKKVIDAKKYRTFGEYLYKGKIEKFQQNIRKKVSNRKTPANKNKEFAVTRDVIIKETEKILASQKQYYTYILTDEYIKKIKDAISYQTEKLIPESGYCPYFKDEKRLPRSHKLNEYRRMYEALNNAKYFDPVLDENTGEILSYQEKEFSREEKKILFDEVLLKGMELTESGAKKLLYHLPDGCEVQLQGRDKTTQKIKGYALVDLEASPFWLRLSQQQQDEFLYDWNSLPLEKLKPKLTNYYSLTESEVDETFQEIKLPSNYASVGKKAMEILLTYIKDGCSYTEALEKAVSEGKLKVDKQTMIYDSLPYYGKILKESTQKLIGKAFSKQFADRNYKEPDTNKNEREFGKIANPVVHQTLNELRKLINEIITVFGKKPLEIGLETTRELKKSKKNREYLSKQQNKNEYARNRIYKEYIEPHLSQIKSRQENPSKYISKFELLEEQNFICPFCSEKITPDDIINSKVDVEHIFPIEESEDITKNNLVIAHNECNADKGKKSPFDAFGDKTSGKYRWNCILHNAQKNLPHKVWRFYQGSLEKFLENKPMSRRFGTDNSYISKIAARYLACLFNDPYHSEIFCIKSSLIAQLRIAWDLNSIMVPLVKNILSEKELEEFKISKNKKIRIDNRHHALDAIVIAYANRGYHNFLNRIHAKEYKINYREKSWLSKILLPPLNRDLEDFKISVKDSIEKANVSIKHDHNTNGSLVKATAYKVYYSGAGEYIITTSKNVEEISFKEKEDPKDTLYRALCKFECRDIDIKDEKLIKKLKYNSTLYKKVQNNLSKAKQELEQDNKKTEEEGKKSQKITEVRIYKKACSLVKGQYIQCGSRLKDKFFAVKEPTEIKTGLGYDTGDNLFLDLYYDKTGKLCGEIIRKVNFNRNKPNYQKEGYTLFERIYQSDILEVDTSEDRISLKNKTGSAPSDRTFIKVNTFTEVNAYFDGKRDKIQIFFGNLLKSSFKNDSFFISSMQKYNVRKVILTSLGIIKYRSQILKNKEV

SEQ ID NO: 69 - protein, 1032 aa, uncultured Termite
MKKRILGLDIGIASVGWALVEFDDEFQDNKKKGTIIKSGVRIFTRAETPKERESLAKPRREARSQRRRIRRRVERLNSIRELFVKNGVVEEWSVSKKNPNNIYITLNQIKTPWQLRMESLDRKLTNEQFAVVLTHLAKHRGYKSLRKDDKAGKVLEAISQNKKRLNDSDYRTLGEMFCKNESYKEHKRNKGGEYINSVARELIEEEVEKIFVKQREKGNNFADVNTEREYLKIAFSQKPAGSISKMVGFCTFENGEKRAPRDSYSAELFKVLCTINNTTFTDMKTGEIRSFSKEEIGKTLETVKNVKDVKYAKIRKDLGLEDSVKFSGVDYRENAKSKGEGEIFVSMKTYHEIKSKIEKLSKEKWDNLKGNTELLDSIVNIIANLKDDESIKKEFQKLKIDEDIIDVLLNFEFKKFINLSFKALRKIIPFQFQGQKYITASTSAGYSLKQEGIKNKLVPPAKENINVAVVARAFAQTRKVINAVIRKYGQFDQINIELATELKNSKFDRSKIEEGQKKFQSQKDKIFKEVQELRGGMTPSSSLLLKYRLWREQDERCVYSGRKISFEDLLDTGFLDIDHIIPYSKSMDDSFNNKVLCLAEENRNKKNDIPFNYYQRIDRDWNLLISIITSMKNMKIAKKSRLLKQELSDIEGFIERNINDTRYATRYIKDFLENNLEFKENEFIKVKVQARSGGLTSVLSYNWGMSKDREESYFHHAKDAIIVACSTQGMVQYISKISQQYENDKDKMKKIKDKTENCIPKPWDSFRADVEESIEGIFVSFAPRHKVTGSAHKETIYSKKHLEKERYVTVKKSLDKIKLSDLENIPCNENCGIIRVLKERLEKFKNDSLKAFADPVHMPTKCPNKKGPVIRSVKIKESNKTGIEVRKGLAERGEMVRVDVFIKDKKYYLVPIYVSDFKNKDLPNKAIAALKLENEWIMIDKTYSFKFSLFKDDLIKIKKKKEEIFGYFGGVHRSTGTIKIKSRHKPKEIDEGIGSRCLLDFRKFQVDVLGNYTEVKHEKRMPAYITRKDKKH

SEQ ID NO: 70 - protein, 1361 aa, Lactobacillus casei
MTKLGKPYGIGVDIGSNSIGFAAVDENSHLIRLKGKTVIGARLFEEGKAAADRRASRTTRRRLSRNRWRLSFLRDFFESHITPTGPNFFMRQKYSEISPKDKARYKYEKRLFNDRTDAEFYQQYPTMYHLRNRLLTDPSKADVREIYFAIHHILKSRGHFLTSGYAKDFNTNKVALNEIFPALQDAYAQVYPDLDITFDENKVNEFKTVLLNEKATPSDTQRALVNLLLAEDGDKDILKQQKQVLTEFAKAVVGLKTKLNVALGTEVDSSEATVWNFSLGQLDDKWAGIESAMTDEGTEILDQIRDLYRARLLNGIVPAGKTLSQAKVDDYAQHHEDLELFKDYLKQLEDDGTAKAIRQLYDRYIDGDDAKPFVREDFVKALTKEVTAHPNAKSPELLERLAQPDFMLKQRNKANGAIPVQMQQRELDQIIKNQSVYYDWLAAPNPVEKHRKSMPYQLDELLNFRIPYYVGPLVTAKEQKAAQGGVFAWMVRKDPDGNITPYNFDEKVDREASANTFIQRMKTTDTYLIGEDVLPKQSLLYQRYEVLNELNNVRVNNEKLSIEQKQQVIRELFERHNSVTIKQFAENLRAHGDYAHIPEIRGLADEKRFLSSLSTYRQLKSLLPDAIDDPAKQADIENIIAWSTVFEDAAIFKTKLKEINWLDSQTITKLSNIRYRGWGQFSHKFLNGLTLGNGHTIIQELFLSNNNLMQILTDETLQKKMTELNADKLKAANINDAIDDAYTSPSNKKALRQVLRVIEDIKRAADGQDPSWLYVETADGGGTPGKRTRARQHQLQEIYANAAHELIDSAVRGELEDKIADKADFNDRLVLYFMQGGRDIYTGTPLNIDQLSSYDIDHILPQSLIKDNSLDNRVLVHAIINREKNATFASTIYAQKMNATWRQWHEAGLISGRKLRNLQMRPDQIDKYASGFVARQLVETRQIIKLTEQIVAAQYPETKIIAVKAGLSHQLREELEFPKNRDVNHYHHAFDAFLAARIGTYLLKRFPNLQAFFTYGKFKKADVKKLRGFNFIRDITHAEDKIVVKDTGEVIWDKKRDVDELDRIYNFKRMLITHEVHFEKADLFKQTVYGAKDSKEAGGKKQLISKKKGYPVDIYGGYTQETGSYLSVVRLTKKAMYAVVKVSTRDAAKLAVAKSISEQKENETLNDIIDEKLSKISKNGKITHELFEVVLPRVGQKTLFKNSKYNLFLVNSDTYMHNYQELWMPREYQKMWKDISLSKYGDAQTEDQLDQIFGFIVSQVNSYFNLYDINQFRKKLNDAADKFATLPMRDTDDMQGKIATIGQLLIGLQANAARSDLRNLDIKTPLGLLQIPNGISLDSDTSVVYQSPTGLLEREVHLSDL

SEQ ID NO: 71 - protein, 1348 aa, Streptococcus equi
MKKPYTIALDIGTNSVGWVVVTDDYRVPTKKMKVLGNTERKTIKKNLIGALLFDSGDTAEGTRLKRTARRRYTRRKNRLRYLKEIFTEEMAKVDDGFFQRLEDSFYVLEDKEGNKHPIFANLADEVAYHKKYPTIYHLRKELVDNPQKADLRLIYLAVAHIIKFRGHFLIEGTLSSKNNNLQKSFDHLVDTYNLLFEEQRLLTEGINAKELLSAALSKSKRLENLISLIPGQKKTGIFGNIIALSLGLTPNFKANFGLSKDVKLQLAKDTYADDLDSLLAQIGDQYADLFLAAKNLSDAILLSDILTESDEITRAPLSASMVKRYREHHKDLVTLKTLIKDQLPEKYQEIFLDKTKNGYAGYIEGQVSQEEFYKYLKPILARLDGSEPLLLKIDREDFLRKQRTFDNGSIPHQIHLEELHAILRRQEVFYPFLKDNRKKIESLLTFRIPYYVGPLARGHSRFAWVKRKFDGAIRPWNFEEIVDEEASAQIFIEKMTKNDLYLPNEKVLPKHSLLYETFTVYNELTKVKYATEGMTRPQFLSADQKQAIVDLLFKTNRKVTVKQLKENYFKKIECWDSVEITGVEDSFNASLGTYHDLLKIIQDKDFLDNPDNQKIIEDIILTLTLFEDKKMISKRLDQYAHLFDKVVLNKLERHHYTGWGRLSGKLINGIRDKQSGKTILDFLKADGFANRNFMQLIHDSELSFIDEIAKAQVIGKTEYSKDLVGNLAGSPAIKKGISQTIKIVDELVKIMGYLPQQIVIEMARENQTTAQGIKNARQRMRKLEETAKKLGSNILKEHPVDNSQLQNDKRYLYYLQNGKDMYTGDDLDIDYLSSYDIDHIIPQSFIKNNSIDNKVLTSQGANRGKLDNVPSEAIVRKMKGYWQSLLRAGAISKQKFDNLTKAERGGLTQVDKAGFIQRQLVETRQITKHVAQILDSRFNTEFDDHNKRIRKVHIITLKSKLVSDFRKEFGLYKIRDINHYHHAHDAYLNAVVAKAILGKYPQLAPEFVYGDYPKYNSFKERQKATQKMLFYSNILKFFKDQESLHVNSDGEEIWNANKHLPIIKNVLSIPQVNIVKKTEVQTGGFYKESILSKGNSDKLIPRKNNWDTRKYGGFDSPTVAYSVLVIAKMEKGKAKVLKPVKEMVGITIMERTAFEENPVVFLEARGYREIQEHLIIKLPKYSLFELENGRRRLLASASELQKGNELFLPVDYMTFLYLAAHYHELTGSSEDVLRKKYFVDRHLHYFDDIIQMINDFAERHILASSNLEKINHTYHNNSDLPVNERAENIINVFTFVALGAPAAFKFFDATIDRKRYTSTKEVLNATLIHQSVTGLYETRIDLSQLGEN

SEQ ID NO: 72 - protein, 1341 aa, Ruminococcus lactaris
MGKGYYVGLDMGTGSVGWAVTDESYQILRRHGKAMWGVRLFESAKTAEERRMFRTGRRRLDRRGWRIEILQEIFAEEISRVDPGFFLRMKESKYYPEDKRDIQGNCPELPYTLFVDKTFTDKDFHKKYPTIYHLRKMLMETEDTPDMRLVYLALHHMMKHRGHFLLSGDISQVTEFKNTFNQFIENIRNEEMDFEIELDESAVQMIEETLKDKNLTRSAKKSKLVKGLNAKNVRDKAFLTLLSGGTVKLSDLFGMEELNEGERPKISFADNGYEEYAAVVEMELGELYYIVESAKAVYDWAILSDILGGSTSVSDAKVRAYEKHKADLKYLKAVVKEYFPKEVYNAVFVESSDKLNNYPAYIGMTKKNGKKVSLEGKRCSREEFMDFLKKNIVVKLPDEEAKMYLQSELEKDSFLPKQVNKDNGVIPYQVHKYELKKILDNLGDKIPFLKENAEKIEKLFSFRIPYYVGPLRTGNGENSKFAWAERKSTEKIYPWNFENVIDVEQSAENFIRRMTNKCTYLIGEDVLPKDSLLYSKFMVLNELNNLRLDGQKISVELKQKIYRDVFCRSRKVTQKKLKSYLIREGIAGKNVELTGIDGDFKGSLTAYHDFKEKLIDVELTQKEKEEIILNIVLFGDDKKLLKQRLKKKFPQLTEKQINTVTALSYKGWGRLSKKLLEEVTVPAPETGEVWNIITALWETNDNFMQLLSKEYQFSDRIEEFNEEKADPEVSYQTIEDLYVSPAVKRQIWQTLQIIQEIEKVMGEKPKRVFVEMAREKQENKRTESRKKTLSDLYTKCKKEEPEWIEALCTSLEKHEEHQLRSDKLYLYYTQKGRCMYSGEPIDLEDLWDNTKYDIDHIYPQSKTMDDSLKNRVLVKKEYNAKKSDTYPIAADIQKKMMPFWKSLLTGGFIPKEKYDRLVRNNPLDANELAGFIERQIVETRQSTKAVAEILKKILPDTEIVYVKAKTVSKFRQDFDFIKVRDMNDLHHAKDAYLNIVVGNVYFVKFTKNAAWFVKENPGRTYNLEKMFIWDVARDGEIAWKAGKSGSIVQVRAMMEKNHILVTRRSYEVKGGLFDQQILKKGKGQVPVKESDERLRDIGKYGGYNKAAGVYFMLVSSKDKKGKEQRTIEFVPIYLKDRVEKDMESARNYLMEERGLREPKILIKKIKIDTLFKVDGFYMWLSGRTSNQLIFKGANQLILSKEDMKTLKKVVKYIQRQKEDKNVKISMRDGITEEELLKLYETFLDKIRHSIYGARLSSQEKTLVNGKEKFIDLSVEAKCQVLYEILHLFQCQSGAANLKMIGGPASAGILVMNNNISKCKNISIVNQSPTGIYEKEIDLLRV

SEQ ID NO: 73 - protein, 1003 aa, Gluconacetobacter diazotrophicus
MIDESLTFGIDLGIGSCGWAVLRRPSAFGRKGVIEGMGSWCFDVPETSKERTPTNQIRRSNRLLRRVIRRRRNRMAAIRRLLHAAGLLPSTDSDALKRPGHDPWELRARGLDKPLKPVEFAVVLGHIAKRRGFKSAAKRKATNISSDDKKMLTALEATRERLGRYRTVGEMFARDPDFASRRRNREGKYDRTTARDDLEHEVHALFAAQRRLGQGFASPELEEAFTASAFHQRPMQDSERLVGFCPFERTEKRAAKLTPSFERFRLLARLLNLRITTPDGERPLTVDEIALVTRDLGKTAKLSIKRVRTLIGLEDNQRFTTIRPEDEDRDIVARTGGAMTGTATLRKALGEALWTDMQERPEQLDAIVQVLSFFEANETITEKLREIGLTLAVLDVLLTALDAGVFAKFKGAAHISTKAARNLLPHLEQGRRYDEACTMAGYDHAASRLSHHGQIVAKTQFNALVTEIGESIANPIARKALIEGLKQIWAMRNHWGLPGSIHVELARDVGNSIEKRREIEKHIEKNTALRARERREVHDLLDLEDVNGDTLLRYRLWKEQGGKCLYTGKAIHIRQIAATDNSVQVDHILPWSRFGDDSFNNKTLCLASANQQKKRSTPYEWLSGQTGDAWNAFVQRIETNKELRGFKKRNYLLKNAKEAEEKFRSRNLNDTRYAARLFAEAVKLLYAFGERQEKGGNRRVFTRPGALTAALRQAWGVESLKKQDGKRINDDRHHALDALTVAAVDEAEIQRLTKSFHEWEQQGLGRPLRRVEPPWESFRADVEATYPEVFVARPERRRARGEGHAATIRQVKERECTPIVFERKAVSSLKEADLERIKDGERNEAIVEAIRSWIATGRPADAPPRSPRGDIITKIRLATTIKAAVPVRGGTAGRGEMVRADVFSKPNRRGKDEWYLVPVYPHQIMNRKAWPKPPMRSIVANKDEDEWTEVGPEHQFRFSLYPRSNIEIIRPSGEVIEGYFVGLHRNTGALIPTPVGPDSYVIA

SEQ ID NO: 74 - protein, 1368 aa, Streptococcus pyogenes
MDKKYSIGLDIGTNSVGWAVITDDYKVPSKKFKVLGNTDRHSIKKNLIGALLFDSGETAEATRLKRTARRRYTRRKNRICYLQEIFSNEIAKVDDSFFHRLEESFLVEEDKKHERHPIFGNIVDEVAYHEKYPTIYHLRKKLADSTDKADLRLIYLALAHMIKFRGHFLIEGDLNPDNSDVDKLFIQLVQTYNQLFEENPINASRVDAKAILSARLSKSRRLENLIAQLPGEKRNGLFGNLIALSLGLTPNFKSNFDLAEDAKLQLSKDTYDDDLDNLLAQIGDQYADLFLAAKNLSDAILLSDILRVNTEITKAPLSASMIKRYDEHHQDLTLLKALVRQQLPEKYKEIFFDQSKNGYAGYIDGGASQEEFYKFIKPILEKMDGTEELLAKLNREDLLRKQRTFDNGSIPHQIHLGELHAILRRQEDFYPFLKDNREKIEKILTFRIPYYVGPLARGNSRFAWMTRKSEETITPWNFEEVVDKGASAQSFIERMTNFDKNLPNEKVLPKHSLLYEYFTVYNELTKVKYVTEGMRKPAFLSGEQKKAIVDLLFKTNRKVTVKQLKEDYFKKIECFDSVEISGVEDRFNASLGTYHDLLKIIKDKDFLDNEENEDILEDIVLTLTLFEDREMIEERLKTYAHLFDDKVMKQLKRRRYTGWGRLSRKLINGIRDKQSGKTILDFLKSDGFANRNFMQLIHDDSLTFKEDLQKAQVSGQGDSLHEHIANLAGSPAIKKGILQTVKVVDELVKVMGRHKPENIVIEMARENQTTQKGQKNSRERMKRIEEGIKELGSDILKEYPVETTQLQNEKLYLYYLQNGRDMYVDQELDINRLSDYDVDHIVPQSFLKDDSIDNKVLTRSDKNRGKSDNVPSEEVVKKMKNYWKQLLNAKLITQRKFDNLTKAERGGLSELDKAGFIKRQLVETRQITKHVAQILDSRMNTKYDENDKLIREVRVITLKSKLVSDFRKDFQFYKVREINNYHHAHDAYLNAVVGTALIKKYPKLESEFVYGDYKVYDIRKMIAKSEQEIGKATAKYFFYSNIMNFFKTEITLANGEIRKRPLIETNGETGEIVWDKGRDFATVRKVLSMPQVNIVKKTEVQTGGFSKESILPKRNSDKLIARKKDWDPKKYGGFDSPTVAYSVLVVAKVEKGKSKKLKSVKELVGITIMERSSFEKDPVDFLEAKGYKEVRKDLIIKLPKYSLFELENGRKRMLASAGELQKGNELALPSKYVNFLYLASHYEKLKGSPEDNEQKQLFVEQHKHYLDEIIEQISEFSKRVILADANLDKVLSAYNKHRDKPIREQAENIIHLFTLTNLGAPAAFKCFDTTIGRNRYKSIKEVLDATLIHQSITGLYETRIDLSQLGGD

SEQ ID NO: 75 - protein, 1504 aa, Bacteroides dorei
MKNIVGLDLGTNSIGWAVVNGSVNDDGSEQLVKIQASGSRIIPMDAAMIGDFNKGNSISQTAERTRLRGVRRLSERYLLRRERLHRILDILGFLPFHFAQDLDRHGKIVKGKEPKLAWRKNEAGQFEFIFQDSFKEMLEDFKLNYPNLITDDKKVPYDWTIYYLRKKGLTSKISKEELAWILLNFNQKRGYYQLRGEEEEENKDKLVEFYALKVVAVEDSGEKKGKDIWYNVHLENGWVYRRTSNMSLDWVGKTKEFIVTTDLEKDGTPKKDKEGNVKRSFRAPKEDDWSLVKKKTEADIDQTHKTVGAYIYDTLLGNPSQKIRGRLVRTIERKYYKEELKLILEKQKEFHLELQDRALYAACIEELYPINEAHRNNVGNRDFTYLFLEDILFYQRPLKSKKSLIDNCPYEENQGLDKETGEIKSFPVKCIAKSHPLFQEFRLWQFIINLRIYRKDLAQDVDVTNELLKTEEDYVALFDWLNGKKEIDQKAFLKYPVFGLKKEIENYRWNYVQDKPYPCNETRSLMLARLEKCDISIEFLTKENEEALWHILYSVEDKNEIVKALQKFADKHDLNASFVDVFQKFPPFKKEYGSYSAKAIKKLLPLMRMGKYWSENSIDKGTRERIDKIITGEYDEKIENRVREKAIHLADVSDFKGLPLWLVCYIVYGRHSEAKEIIQWKSPADIDSYLRSFKQHSLRNPIVEQIIIETLRVVRDIWKQVGNIDEIHVELGREMKNPADKRKKMTQQMSENENTNLRIKYLLTEFLNPEYEVENVRPYSPSQQDILRIYEEGVLNSVSDLPEEISDILKKFTETDLKKRPSRSEVLRYKLWLEQKYRSPYTGEVIPLGKLFTPAYEIEHVIPQSYYFDDSFSNKVICEAEVNKLKSNLLGHEFIVKHHGEIVELPFGKKVRIFTVDEYEQFVKDNYSRTRSKMKKLLMDDIPEEFVTRQLNDSRYISKVVKSLLSNIVREKGEEEAISKNVIPCTGGVTDRLKKDWGINEVWNKIILPRFQRLNELTGTNKFTTKNVGIQEIPTMPLELQKGFNKKRIDHRHHAMDAIIIACANRNIINYLNNKSATAKAELSRYDLQKMLCDKAKTDNNGNYKWVIRKPWASFTQDTYLALENIIVSFKQNLRVINKATNRFLHYNEEGKKIFVKQGKGDNWAIRKSMHKDTVFGEVNLRRIKTVALNEAMKNPQSIVVKDFKRKLLELWNLGFDAKRIKKYFEDNRETWSDINLSKIEVYYFSKDTKDRFFATRKPLDTSFDRKKIENNITDTGIQKILLRHLELKDNNPDIAFSPDGIDEMNRNIIQLNNGKYHQPIIKIRWYEQADKFAVGQTGNKSSKFVEAAKGTNLFFAVYESNILDKKTNTIIKKRNYATIPLNVAIERQKQGLPVAPEDENGNDPIFVLSPNDLVYLPTDDELANGIIAQPLDRGRIYKMVSSSGEQCFFIKHIVANVLVDKFEFSPLNKMERALTGEMIKMICIPIKVDRLGNVLESSSSYKK

SEQ ID NO: 76 - protein, 1426 aa, Capnocytophaga sputigena
MKNILGLDLGITSISFAHIVEDENKEKSEIKELGVRIVSLTTDEQSDFEKGKSITTNANRTLKHGARLNLDRYQQRRKYLIDLLQKANLITSSSILAENGKNTTHSTWQLRAKAVTERIEKEEFARVLLAINKKRGYKSSRKAKTEDEGQAIDGMAIAKRLYDENLTPGQLSLQLLQQNKKLLPDFYRSDLQREFDLVWNFQKQFYPDILTDSFYKELQGKGKDATSKAFSKRYHFDTAENKGSKESVRLQAYQWRAEAISKQLSKEEVAYVLTEINNNLNNASGYLGAISDRSKELYFNRQTVGQYLYAQLQENRHNSLKNKVFYRQDYLDEFERIWETQASFHKELTDELKKQIRDVVIFYQRKLKSQKGLISFCEFESKEIEIEKDGKTITKTIGARVVPKSSPLFQEFKIWQILNNVTCKRKGIRKKKSSAKSTELDLFNEPSQTIFSLDMECKQLLFDELNLKGDLKSDKVLKLLGYSPQEWEINYNQLEGNRTQKALYEAYLKIVEMEAHDVKDILQIKSAKDDWSLDESPLSASEIKEKVKDIFQALGICTKILYFDPLLPVKEFEKQDSYQLWHLLYSYESDDSTSGNETLYRILEKKYAFKREHARILANVALQDDYGSLSTKAIRKIYPNIKENQYSKACELAGYKHSKLSLTTEELEARELKNIIPLLKKNALRNPVVEKILNQMINVVNALIEKNSERDAEGKITKYFHFDEIRIELARELKKNAQKRYEMTQNINKAKLEHQKISEILQKKFGIKNPTKSDIIRYRLYQELEHNGYKELYTNAPIARDMLFSKNIEIEHIVPKARVFDDSFSNKTLTFHRINSNKGEYTAFDYITSLNSEEELNQYLTRVENAYKTKSISLTKYKNLLKKASEIGDGFINRDLRDTQYIAKKAKEILFQVTKNVLSTSGSITDRLREDWGLVDVMKELNMPKYQSLGLTEVEERKEGNKVTVIKNWTKRNDHRHHAMDALTVAFTKPSYIQYLNHLNARKDENNKNYSVILAIEEKETIKVPTNNGKNKRVFIEPIPNFRQVAKKHLEEIFISHKAKNKVVTKNVNKPAGTDKQQITLTPRGQLHKETIYGKYQYYVNKEEKVGVKFDERTITKVSNPLYREALLKRLQANDNDPKKAFTGKNALSKNPIYLDETKTKTLPEKVNLTYLEEDFSIRKDISPDNFKDLKSIEKVIDQGVKRILIKRLQDYDNDPKKAFVDLEKNPIWLNKEKGIAIKRVTISGVSNAQPLHIGKDHLGKTTLNKEGNEIPVDYVSTGNNHHVAIYRDKEGNLQEQIVSFFEAVVRTQQGLPIIDKTYKQEEGWQFLFTMKQNEMFVFPNATTGFNPAEIDLLDPKNKKLISPNLFRVQKIATKDYFFRHHLETNVETDNVLKNTTWKREGLSGLKDIVKVRINHLGDIVSIGEY

SEQ ID NO: 77 - protein, 1443 aa, Parabacteroides johnsonii
MIKLLYLEKLKQYTMKKILGLDLGTSSIGWALVNEAENSDEVSSIIKLGVRVNPLTVDEMQNFEKGKSITTNADRTLKRSMRRNLQRYKLRRDALIELLKKVGFITDKTILSEQGNRTTFETYRLRAKAAEEEISLKELARVLLMINKKRGYKSSRKAKGEEEGALIDGMEIAKKLYDEDLTPGQLCLQLLESGKKFFPDFYRSDLQEEFNKIWDFQKQFNLFSFCDVAKEEVKGKNKSQTWAILAKYFVETKKVNVWNEHEAQTENREEVYKLVGLKRTVKGEELKKENYRWRVQALTEQLDLEKIAVVLQEINGQISASSGYLGAISDRSKVLYFNRQTVGQYQMAELNKNPNMSLRNMVFYRQDYLDEFNVIWEKQAEFHKELTPELKKEIRDIIIFYQRRLKSQKGLISFCEFENREVVVEKEGKKQTKIIGCKVIPRSHPLFQEFKIWQTLNNIEVFVGEKKGKRKKSNVSSDLFGDTEDALITEGRRFLYQEEKKILAKELSIKKGLTKAEILRLLFENPQELDINFKQIDGNQTGFALFSAYSNMIEKYGYEPLDFKKPAEDLISQLKTVFTDLGWNTDLLFIDLDKENKEWEKQPYFRLWHLLYSFEGDNTPTGNGKLIEKIMQLCGIEKEYAIELANVSLQDDYGSLSAKAIKKILLYLKEGNQYDMACEYAGYRHSKSSLTKEEIENKVLKDKLEILPKNSLRNPVVEKILNQMVNVINTVMEVYGRPDEIRVELARELKKSAKEREELTKAVAKNTREHEEIRKVLQSEFGMINVSRNDIIRYKLYEELKDNGYKTLYSNQYIPREKLFSKEIDIEHIIPQSRLFDDSLSNKTLEYKSINIEKGNKTAYDFVKEKYGEEGLQQYLNRCENLCKDKKAKLRKLKMELNEIPDGFIDRDLRNTQYIAKKALSMLTEICRRVVATTGSITDKLREDWQLVDVMKELNLPKYEALGLVEVYEDKDGRKIKRIKDWTKRNDHRHHAMDALTVAFTKDVFIQYFNNKNAAWESDSKEHTNIVGIKTRYFESGKAVPPIPLGQFRVEAKCHLENLLVSIKAKNKVVTTNVNCIKKKGGTYKNTQQTPRGQLHLETIYGSHNQYVTKIEKVNASFDAVKIATVSKQDYRNALLKRLEVFGNDPKKAFTGKNSLEKNPIYLDRAQTIQVPDKVQTVELETAYTIRKPVDPTLNVDKVVDKKIRLILEQRLKEYGGDAKKAFVNLDENPIWLNEEKGISIKRVTIRGISKAQALHDKKDKDGNFILDETGKRIPVDFVNTGNNHHVAIYRKPVLDKKGQVIFDDEGNPMYELDEDVVPFFEAVTRANLGIPIIDKDYKKSEGWQFLFSMKQNEYFVFPNEKTGFNPKEVDLLDPDNYAMISPNLFRVQKIGLNDYTFRHHLETTIQNDLKFITWIRCGKSGIKDIVKVRINHIGQIVSVGEY

SEQ ID NO: 78 - protein, 984 aa, Campylobacter jejuni
MARILAFDIGISSIGWAFSENDELKDCGVRIFTKVENPKTGESLALPRRLARSARKRLARRKARLNHLKHLIANEFKLNYEDYQSFDESLAKAYKGSLISPYELRFRALNELLSKQDFARVILHIAKRRGYDDIKNSDDKEKGAILKAIKQNEEKLANYQSVGEYLYKEYFQKFKENSKEFTNVRNKKESYERCIAQSFLKDELKLIFKKQREFGFSFSKKFEEEVLSVAFYKRALKDFSHLVGNCSFFTDEKRAPKNSPLAFMFVALTRIINLLNNLKNTEGILYTKDDLNALLNEVLKNGTLTYKQTKKLLGLSDDYEFKGEKGTYFIEFKKYKEFIKALGEHNLSQDDLNEIAKDITLIKDEIKLKKALAKYDLNQNQIDSLSKLEFKDHLNISFKALKLVTPLMLEGKKYDEACNELNLKVAINEDKKDFLPAFNETYYKDEVTNPVVLRAIKEYRKVLNALLKKYGKVHKINIELAREVGKNHSQRAKIEKEQNENYKAKKDAELECEKLGLKINSKNILKLRLFKEQKEFCAYSGEKIKISDLQDEKMLEIDHIYPYSRSFDDSYMNKVLVFTKQNQEKLNQTPFEAFGNDSAKWQKIEVLAKNLPTKKQKRILDKNYKDKEQKNFKDRNLNDTRYIARLVLNYTKDYLDFLPLSDDENTKLNDTQKGSKVHVEAKSGMLTSALRHTWGFSAKDRNNHLHHAIDAVIIAYANNSIVKAFSDFKKEQESNSAELYAKKISELDYKNKRKFFEPFSGFRQKVLDKIDEIFVSKPERKKPSGALHEETFRKEEEFYQSYGGKEGVLKALELGKIRKVNGKIVKNGDMFRVDIFKHKKTNKFYAVPIYTMDFALKVLPNKAVARSKKGEIKDWILMDENYEFCFSLYKDSLILIQTKDMQEPEFVYYNAFTSSTVSLIVSKHDNKFETLSKNQKILFKNANEKEVIAKSIGIQNLKVFEKYIVSALGEVTKAEFRQREDFKK

SEQ ID NO: 79 - protein, 1082 aa, Neisseria meningitidis
MAAFKPNPINYILGLDIGIASVGWAMVEIDEDENPICLIDLGVRVFERAEVPKTGDSLAMARRLARSVRRLTRRRAHRLLRARRLLKREGVLQAADFDENGLIKSLPNTPWQLRAAALDRKLTPLEWSAVLLHLIKHRGYLSQRKNEGETADKELGALLKGVADNAHALQTGDFRTPAELALNKFEKESGHIRNQRGDYSHTFSRKDLQAELILLFEKQKEFGNPHVSGGLKEGIETLLMTQRPALSGDAVQKMLGHCTFEPAEPKAAKNTYTAERFIWLTKLNNLRILEQGSERPLTDTERATLMDEPYRKSKLTYAQARKLLGLEDTAFFKGLRYGKDNAEASTLMEMKAYHAISRALEKEGLKDKKSPLNLSPELQDEIGTAFSLFKTDEDITGRLKDRIQPEILEALLKHISFDKFVQISLKALRRIVPLMEQGKRYDEACAEIYGDHYGKKNTEEKIYLPPIPADEIRNPVVLRALSQARKVINGVVRRYGSPARIHIETAREVGKSFKDRKEIEKRQEENRKDREKAAAKFREYFPNFVGEPKSKDILKLRLYEQQHGKCLYSGKEINLGRLNEKGYVEIDHALPFSRTWDDSFNNKVLVLGSENQNKGNQTPYEYFNGKDNSREWQEFKARVETSRFPRSKKQRILLQKFDEDGFKERNLNDTRYVNRFLCQFVADRMRLTGKGKKRVFASNGQITNLLRGFWGLRKVRAENDRHHALDAVVVACSTVAMQQKITRFVRYKEMNAFDGKTIDKETGEVLHQKTHFPQPWEFFAQEVMIRVFGKPDGKPEFEEADTPEKLRTLLAEKLSSRPEAVHEYVTPLFVSRAPNRKMSGQGHMETVKSAKRLDEGVSVLRVPLTQLKLKDLEKMVNREREPKLYEALKARLEAHKDDPAKAFAEPFYKYDKAGNRTQQVKAVRVEQVQKTGVWVRNHNGIADNATMVRVDVFEKGDKYYLVPIYSWQVAKGILPDRAVVQGKDEEDWQLIDDSFNFKFSLHPNDLVEVITKKARMFGYFASCHRGTGNINIRIHDLDHKIGKNGILEGIGVKTALSFQKYQIDELGKEIRPCRLKKRPPVR

SEQ ID NO: 80 - protein, 1021 aa, Clostridium cellulolyticum
MKYTLGLDVGIASVGWAVIDKDNNKIIDLGVRCFDKAEESKTGESLATARRIARGMRRRISRRSQRLRLVKKLFVQYEIIKDSSEFNRIFDTSRDGWKDPWELRYNALSRILKPYELVQVLTHITKRRGFKSNRKEDLSTTKEGVVITSIKNNSEMLRTKNYRTIGEMIFMETPENSNKRNKVDEYIHTIAREDLLNEIKYIFSIQRKLGSPFVTEKLEHDFLNIWEFQRPFASGDSILSKVGKCTLLKEELRAPTSCYTSEYFGLLQSINNLVLVEDNNTLTLNNDQRAKIIEYAHFKNEIKYSEIRKLLDIEPEILFKAHNLTHKNPSGNNESKKFYEMKSYHKLKSTLPTDIWGKLHSNKESLDNLFYCLTVYKNDNEIKDYLQANNLDYLIEYIAKLPTFNKFKHLSLVAMKRIIPFMEKGYKYSDACNMAELDFTGSSKLEKCNKLTVEPIIENVTNPVVIRALTQARKVINAIIQKYGLPYMVNIELAREAGMTRQDRDNLKKEHENNRKAREKISDLIRQNGRVASGLDILKWRLWEDQGGRCAYSGKPIPVCDLLNDSLTQIDHIYPYSRSMDDSYMNKVLVLTDENQNKRSYTPYEVWGSTEKWEDFEARIYSMHLPQSKEKRLLNRNFITKDLDSFISRNLNDTRYISRFLKNYIESYLQFSNDSPKSCVVCVNGQCTAQLRSRWGLNKNREESDLHHALDAAVIACADRKIIKEITNYYNERENHNYKVKYPLPWHSFRQDLMETLAGVFISRAPRRKITGPAHDETIRSPKHFNKGLTSVKIPLTTVTLEKLETMVKNTKGGISDKAVYNVLKNRLIEHNNKPLKAFAEKIYKPLKNGTNGAIIRSIRVETPSYTGVFRNEGKGISDNSLMVRVDVFKKKDKYYLVPIYVAHMIKKELPSKAIVPLKPESQWELIDSTHEFLFSLYQNDYLVIKTKKGITEGYYRSCHRGTGSLSLMPHFANNKNVKIDIGVRTAISIEKYNVDILGNKSIVKGEPRRGMEKYNSFKSN

SEQ ID NO: 81 - protein, 1131 aa, Acidovorax ebreus
MAQHVFGLDIGIASVGWAILGEQRIIDLGVRCFDKAETAKEGDPLNLTRRQARLLRRRLYRRAWRLTQLSRLLKRKGLIADAKLFAKAPSYGDSAWELRRQGLDRLLTPLEWARVIYHQCKHRGFHWTSKAEEAKADSDAEGGRVKQGLAHTKALMQAKNYRSAAEMVLAEFPDAQRNKRGQYDKALSRVLLGEELALLFATQRRLGNPHASDFFEKLILGDGDRKSGLFWQQKPALSGADLLKMLGKCTFEKGEYRAPKASFSVERHVWLTRLNNLRIVVDGRSRPLNEAERQAALLLPYQTETSKYKTLKNAFIKAGLWGDGVRFGGLAYPSQAQIDAEKTKDPEDQFLVKLPAWHELRKAFKAAGHEALWQQISTPALDGDPTLLDQIATVLSVYKDGAEVVQQLRQLALPEPAASIAVLEKISFDKFSSLSLKALRRIVPLMQSGLRYDEAVAQIPEYGHHSQRIEPGAAKHLYLPPFYEAQRKYAGKGDHIGSMQFRDDADIPRNPVVLRALNQARKVVNALIREYGSPIAVNIEMARDLSRPLDERNKVKRAQEEFRDRNDRARSEFERDFGYKPKAAAFEKWMLYREQLGQCAYSQQPLDIQRVLDDHNYAQVDHALPYSRSYDDSKNNKVLVLTHENQNKGNRTAFEYLTSFPDGEDGERWRTFVAWVQGNKAYRMAKRNRLLRKNYGVDESKGFIDRNLNDTRYICKFFKNYVEEHLQLAARADGDTARRCVVVNGQLTAFLRARWGLTKVRGDSDRHHALDAAVVAACTHGMVKALADYSRRKEISFLQEGFPDPETGEILNPAAFDRARQHFPEPWTHFAHELKARLFTDDLAALREDMQRLGSYTTEDLGRLRTLFVSRAPQRRSGGAVHKETIYAQPESLKQQGGVIEKILLTSLKLQDFDKLLNPESNDHFVEPHRNERLYAAIRQRLEQFGGRADKAFGPDNLFHKPDKNNQPTGPVVRSIKLVRGKQTGIPIRGGLAKNDSMLRVDIFTKAGKFHLVPVYVHHRVTGLPNRAIVAFKDEDEWTLIDESFAFLFSVYPNDYVKVTLKKEQQSGYYSGADRSTGAMNLWAHDRAASVGKDGLIRGIGVKTALSVEKFNVDVLGRIYLAPPETRSGLA

SEQ ID NO: 82 - protein, 1122 aa, Streptococcus suis
MSNGKILGLDIGIASVGVGVIDAQTGEIIHASSRIFPSANAANNAERRTFRGSRRLIRRKKHRIKRLDDLFNDFHINLDGEMSTDNPYVLRVKGLSQKLTVEELYISIKNIMKRRGISYLDDAESDNEAGRSDYAKAIERNRQLLTSKTPGEIQLERLEKYGQLRGNFTIIDEEGQSQQIINVFSTSDYVKEVEKILDCQKMYHKFISDEFCDKLIELLREKRKYYVGPGNEKSRTDYGIYRTDGTTLENLFGILIGKCTFYPDQYRSSRASYTAQEFNFLNDLNNLTVPTETKKLSQEQKEFLVNYAKETSVLGAGKILQQIAKLADCKVEDIRGYRLDNKDKPELHTFETYRAMKGLVPLVDIGVLSREQLDILADILTLNTDFEGIREALKKQLPNVFDEKQVKGLASFRKSKSQLFAKGWHNLSQKIMLEVIPELYATSDEQMTILTRLGKFEKSSVAEYPSSINVDEITDEIYNPVVAKSIRQTIKIINASIKKWGEFDQIVIEMPRDRNEDEEKKRIADGQKANAKEKADSILRAAELYCAGKVLPDYVYNGHNQLATKIRLWYQQGERCIYTGQPISIHDLIHNQNQYEIDHILPLSLTFDDSLSNKVLVLATANQEKAQRTPYNYLKSATSAWSYREFKDYVTKRKGIGKKKCEYLTFEEDINGFEVRSKFIQRNLVDTRYASKVILNALQDYFKISGIQTKVSVVRGQFTSQLRHKWGIEKTRETYHHHAVDALIIAASSQLRLWKKQESPLVVDYQEGRQVDLETGEILELTDEQYKELVYQPPYQGFVNTISSSAFDNEILFSYQVDSKVNRKISDATIYATRNAQLGKDKTEGIYVLGKIKDIYTQAGYEAFLKRYTKDKTSFLMYHKDLDTWEKVIEIILRDYREYDEKGKEIGNPFERYRRENGYVKKYSRKGNGTAIKSLKYYDNKLGNHIDITPENSRNAVVLQSLKPWRTDVYFNKETGKYEFLGIKYSDLSFEKGTGEYGISQEKYDSIKIAEGVAKKSIFKFTLYKQDLLFIKDIENNFGKLLRFTSKNDTSKHYVELKPYDKNKFGTEEPLLPVLGNVAKSGQCIKGLNKSNISIYKVRTDILGYRHFIKQEGEHPQLKFKK

SEQ ID NO: 83 - protein, 1509 aa, Bacteroides coprophilus
MKKTLGLDLGTNSIGWAVINSNIDSEGKEKLVGISSCGSRIIPMDATTLGDFGKGNTKSPVAERTRLRGIRRLLERSLLRRERLHRVLSVMGFLPEHYASQLDRYGKFLPETEPKLAWYKDDSGRYQFLFQKSFHEMLEDFRQHQPELVAGEKKIPYDWTIYYLRKKALSQEITKEELAWILLNFNQKRGYYQLRGEEEQEENNKSVEYHALKVVSVEDSGERKGKDIWYNVTLENGWVYRRASNIPLDWTGKVKEFVVTTELDDAGNPKKDKEGNVKRSFRAPKEDDWGLLKTRTQAQIDESGKTVGTYIYESLLCMPNQKIRGKLVRTIERKYYKDELRQILVKQSEFHAALQDHNLLLSCIEELYPNNEAHRRLLSASSFIYFLIEDILFYQRPLKSQKGLIDNCPYESHIYKDKKDGSLHHVPLKCVSKSHPLFQEFRLWQFLSNLRIYQRERMMDGSLKLDVDVTREFLPSEEDYVKLFDWLNERKEISQKFLLAYKPFGLKKNEQANYRWNYVEDKSYPCNETRAEIKSRLSKAGVPEEFLTEEKEEALWHILYSISDKKELTKALGTFAAKNCLNESFVEVFAKIPPFESNYAAYSLKAIRKLLALMRMGKYWNEQAIDRQTRDRIEKILTGEYDETIRSRVREKAMLLTDISSFRGLPLWLACYIVYDRHSESKELVKWETPADIDHFLSKFKQNSLRNPIVEQVITESLRTVRDIWKQEGKIDEIHVELGREMKNPAKERARITAQVQENENTNLRIKALLAEFMNPEFEIENVHPYSPGQQEILRIYEDGVLSGIAEKDLPDDITAILKKFRENDVKKRPTTSEVLRYKLWLEQRYRSPYTGRVIPLGKLFTPAYEIEHVIPQSRYFDDSISNKVICESAVNKLKDNCLGYEFIKKHSGEMVELGNGETVPVFSVEEYERFVKESYFGNSKKMKKLLLEDIPDSFIERQLNDSRYISRVVTSLLSNLVCEEGEQDGLSKNVIVCTGGITDRLKKDWGVQEVWNRIILPRFLRLNEITGRTDFTSTSVNGHLLPALPLYLQKGFNKKRIDHRHHAMDAIVIACANRNIVNYLNNSSARKNSEISRYDLQRLLCEKVKTDANGNYKWILRKPWETFTQDVYAALTNIVVSFKQNLRVINRTTNYYQHYNEAGEKRMIPQTKGDRWAIRKPMHKDTVYGEVNLRKEKTLPLRDVVKNPSIVVDKSLKNKLYELLKSQYDLKAIAKYFETHQDVWADVNLKKIKVYYFTKETNERFFATRKSLDPSFDQKKIEEEVTDTGVQKILLHHLQQNNNDPDMAFSPDGIDRMNQNMTILNDGKWHQPIYKVRTYEKADKFAVGESGNKAKKFVEAAKGTNLFFAVYESVQEDEAIGKQVCKRTFATIPLNEVIKRKKQGLPAAPEDLNGNLPKFVLSPNDLVYLPTEEERNSSRIIQPLDRERIYKMVSSSGSQCFFIKVFVANSIWDKNEYSSLNKMERAITNEMIKEICVPIKIDRLGNVSLIQI

SEQ ID NO: 84 - protein, 1219 aa, Bacteroides cellulosilyticus
MKEEVRGKNRSQTWAILAKFFVWSEKESVWNEKEARTEERVKEYKLVGLKRDTKGNELKLENYRWRVQALSEQLNPEIVAIVLQEINGQISASSGYLGAISDRSKQLYFNRQTVGQYLMSELEKDPNVSLRNRVFYRQDYLDEFDRIWEKQAEFHEELTVELKKEIRDIIIFYQRRLKSQKGLISFCEFEKREVVVEEDGRKKNKTVGCRVIPRSHPLFQEFKIWQTLNDIEVFAWDKQSKRKKADKSSILFDNSEDALLVEGKRFLYQEEKELLAKELFVKESMKKAEVLKLLFENYQELDLNFKQIDGNHTGFALFSAYSKMIEKYGYEPVDFKRSADEIIEKLETIFTNLGWNTELLSIDLSKEDKELERQSYFRLWHLLYSFEGDNTPTGNGKLLEKIMQLCDVEKEYAVELANVSFQEDYGSLSAKAIKKILPYLKEGNQYDVACDYAGYRHSRSSLTKDEIENKILKDKLEILPKNSLRNPVVEKILNQMVNLINTLIDTYGKPDEIRVELARELKKNAKEREELTKSIARNTREHDEIRQLLRTEFGMMNVSRNDIIRYKLYEELKDNGYKTLYSNEYIPREKIFSKEIDIEHVIPQARLFDDSLSNKTLEYRAINIEKGNKTAYDFVKEKYGNDGLEKFLNRCETLFKDKRTKLRKLKMEEKDIPEGFIDRDLRNTQYISKKAFAMLNEISRRVVATTGSITDKLREDWQLVDLMKELNLPKYEKLGMVEMFEDKDGRKIKKITDWTKRNDHRHHAVDALTVAFTKDVFIQFYNNKNAAWMPASKEHANITGIKARYFENGKALAPMPLAQFRAEAKRHLENLLVSIKAKNKVITSNVNRTKNKNGENRKLQQTPRGQLHLETVYGSHRQYATKIEKVNAAFDVTKIATVSKLAYRNALLKRLEAFGNDPKKAFTGKNTLEKNPLYLDENQTEMVPEKVQTVEFETVYTIRKPIDPNLSIDKVVDVKIRSVLEKRLKEYGGDAKKAFVNLDENPIWLNEAKGISIKRVSIRGISNAQSLHEKKDKDGNLILGKEGRKIPVDFVNTGNNHHVAIYKKPVLDKVGQVVLDEEGNPKYELDEVVVSFFDAVTRANLGQPIIDKDYRRSEGWQFLFSMKQNEYFVFPNDKTGFNPKEVDLLNPENYALISPNLFRVQKFAYKNYVFRHHLETTIKDTSSTLKGITWTDFRSSKGLDKIVKVRVDHIGQIVSIGEY

SEQ ID NO: 85 - protein, 1329 aa, Catenibacterium mitsuokai
IVDYCIGLDLGTGSVGWAVVDMNHRLMKRNGKHLWGSRLFSNAETAANRRASRSIRRRYNKRRERIRLLRAILQDMVLEKDPTFFIRLEHTSFLDEEDKAKYLGTDYKDNYNLFIDEDFNDYTYYHKYPTIYHLRKALCESTEKADPRLIYLALHHIVKYRGNFLYEGQKFNMDASNIEDKLSDIFTQFTSFNNIPYEDDEKKNLEILEILKKPLSKKAKVDEVMTLIAPEKDYKSAFKELVTGIAGNKMNVTKMILCEPIKQGDSEIKLKFSDSNYDDQFSEVEKDLGEYVEFVDALHNVYSWVELQTIMGATHTDNASISEAMVSRYNKHHDDLKLLKDCIKNNVPNKYFDMFRNDSEKSKGYYNYINRPSKAPVDEFYKYVKKCIEKVDTPEAKQILNDIELENFLLKQNSRTNGSVPYQMQLDEMIKIIDNQAEYYPILKEKREQLLSILTFRIPYYFGPLNETSEHAWIKRLEGKENQRILPWNYQDIVDVDATAEGFIKRMRSYCTYFPDEEVLPKNSLIVSKYEVYNELNKIRVDDKLLEVDVKNDIYNELFMKNKTVTEKKLKNWLVNNQCCSKDAEIKGFQKENQFSTSLTPWIDFTNIFGKIDQSNFDLIENIIYDLTVFEDKKIMKRRLKKKYALPDDKVKQILKLKYKDWSRLSKKLLDGIVADNRFGSSVTVLDVLEMSRLNLMEIINDKDLGYAQMIEEATSCPEDGKFTYEEVERLAGSPALKRGIWQSLQIVEEITKVMKCRPKYIYIEFERSEEAKERTESKIKKLENVYKDLDEQTKKEYKSVLEELKGFDNTKKISSDSLFLYFTQLGKCMYSGKKLDIDSLDKYQIDHIVPQSLVKDDSFDNRVLVVPSENQRKLDDLVVPFDIRDKMYRFWKLLFDHELISPKKFYSLIKTEYTERDEERFINRQLVETRQITKNVTQIIEDHYSTTKVAAIRANLSHEFRVKNHIYKNRDINDYHHAHDAYIVALIGGFMRDRYPNMHDSKAVYSEYMKMFRKNKNDQKRWKDGFVINSMNYPYEVDGKLIWNPDLINEIKKCFYYKDCYCTTKLDQKSGQLFNLTVLSNDAHADKGVTKAVVPVNKNRSDVHKYGGFSGLQYTIVAIEGQKKKGKKTELVKKISGVPLHLKAASINEKINYIEEKEGLSDVRIIKDNIPVNQMIEMDGGEYLLTSPTEYVNARQLVLNEKQCALIADIYNAIYKQDYDNLDDILMIQLYIELTNKMKVLYPAYRGIAEKFESMNENYVVISKEEKANIIKQMLIVMHRGPQNGNIVYDDFKISDRIGRLKTKNHNLNNIVFISQSPTGIYTKKYKL

SEQ ID NO: 86 - protein, 1152 aa, Roseburia inulinivorans
MNAEHGKEGLLIMEENFQYRIGLDIGITSVGWAVLQNNSQDEPVRITDLGVRIFDVAENPKNGDALAAPRRDARTTRRRLRRRRHRLERIKFLLQENGLIEMDSFMERYYKGNLPDVYQLRYEGLDRKLKDEELAQVLIHIAKHRGFRSTRKAETKEKEGGAVLKATTENQKIMQEKGYRTVGEMLYLDEAFHTECLWNEKGYVLTPRNRPDDYKHTILRSMLVEEVHAIFAAQRAHGNQKATEGLEEAYVEIMTSQRSFDMGPGLQPDGKPSPYAMEGFGDRVGKCTFEKDEYRAPKATYTAELFVALQKINHTKLIDEFGTGRFFSEEERKTIIGLLLSSKELKYGTIRKKLNIDPSLKFNSLNYSAKKEGETEEERVLDTEKAKFASMFWTYEYSKCLKDRTEEMPVGEKADLFDRIGEILTAYKNDDSRSSRLKELGLSGEEIDGLLDLSPAKYQRVSLKAMRKMQPYLEDGLIYDKACEAAGYDFRALNDGNKKHLLKGEEINAIVNDITNPVVKRSVSQTIKVINAIIQKYGSPQAVNIELAREMSKNFQDRTNLEKEMKKRQQENERAKQQIIELGKQNPTGQDILKYRLWNDQGGYCLYSGKKIPLEELFDGGYDIDHILPYSITFDDSYRNKVLVTAQENRQKGNRTPYEYFGADEKRWEDYEASVRLLVRDYKKQQKLLKKNFTEEERKEFKERNLNDTKYITRVVYNMIRQNLELEPFNHPEKKKQVWAVNGAVTSYLRKRWGLMQKDRSTDRHHAMDAVVIACCTDGMIHKISRYMQGRELAYSRNFKFPDEETGEILNRDNFTREQWDEKFGVKVPLPWNSFRDELDIRLLNEDPKNFLLTHADVQRELDYPGWMYGEEESPIEEGRYINYIRPLFVSRMPNHKVTGSAHDATIRSARDYETRGVVITKVPLTDLKLNKDNEIEGYYDKDSDRLLYQALVRQLLLHGNDGKKAFAEDFHKPKADGTEGPVVRKVKIEKKQTSGVMVRGGTGIAANGEMVRIDVFRENGKYYFVPVYTADVVRKVLPNRAATHTKPYSEWRVMDDANFVFSLYSRDLIHVKSKKDIKTNLVNGGLLLQKEIFAYYTGADIATASIAGFANDSNFKFRGLGIQSLEIFEKCQVDILGNISVVRHENRQEFH

SEQ ID NO: 87 - protein, 686 aa, Coprococcus comes
MKKQDSPKNNMGYTAYNLNVLGYEEFAKRVELLFKDTDAVKRLNDSHMQMAEGFDLNALPGSPALRRGVSQAIKVLDDIVSVAGKAPDRIYLKVTRTASNSRKGKRTAKRSDKIKQALKALDADAAADLGAAKLLRELGMFDEKEINERIYLYFHQAGKCLYTGKPIDITRIASNDYYVDHVVPLAYRKDESLDNKVLVYAEASRYKSETLLVSPAVQRKMLPFWRMLRNAGLMSERKLNALIRTEISEGMLKSIIGRQFTENSWEAKLFTAAIAAKYPGTVVIPVKAGVIGAVRSRIGIPKSLKANQFYHAHDALLAAEVGRYMELAKPAFVHNRVKYEQYMRKIKLVNEENKKAPKSQLDFFAGGFFFDRVDKDTGEVYWNKDEEVERIYRACGWKNLRVTYAAFEDGGAFWKQTIYSPREKSKLIATKSDRPAEIYGGYSSQTFANFFVYEVMKKKVKQLRFGAVPAAIASKSDPDTYNAMLEMYARGLAKTAKEKFVRIVRARVLKNTMIELYGERFRIAGEKQVYPVRQMPLAIDEVYLLKGVETIAAAGNAGASAKIDFEKAAESLVGFWDLLLEKLPVNYPKLTVQLKLGLLKHPKDILAATSESEFPAIVYKIAEAEIQVMEQASGLRNMSDTKILGGNTFGGSLVFTFNKVLNDPKSKACFIDTTPAGLYEVKTKIW

SEQ ID NO: 88 - protein, 1105 aa, Actinomyces coleocanis
MDNKNYRIGIDVGLNSIGFCAVEVDQHDTPLGFLNLSVYRHDAGIDPNGKKTNTTRLAMSGVARRTRRLFRKRKRRLAALDRFIEAQGWTLPDHADYKDPYTPWLVRAELAQTPIRDENDLHEKLAIAVRHIARHRGWRSPWVPVRSLHVEQPPSDQYLALKERVEAKTLLQMPEGATPAEMVVALDLSVDVNLRPKNREKTDTRPENKKPGFLGGKLMQSDNANELRKIAKIQGLDDALLRELIELVFAADSPKGASGELVGYDVLPGQHGKRRAEKAHPAFQRYRIASIVSNLRIRHLGSGADERLDVETQKRVFEYLLNAKPTADITWSDVAEEIGVERNLLMGTATQTADGERASAKPPVDVTNVAFATCKIKPLKEWWLNADYEARCVMVSALSHAEKLTEGTAAEVEVAEFLQNLSDEDNEKLDSFSLPIGRAAYSVDSLERLTKRMIENGEDLFEARVNEFGVSEDWRPPAEPIGARVGNPAVDRVLKAVNRYLMAAEAEWGAPLSVNIEHVREGFISKRQAVEIDRENQKRYQRNQAVRSQIADHINATSGVRGSDVTRYLAIQRQNGECLYCGTAITFVNSEMDHIVPRAGLGSTNTRDNLVATCERCNKSKSNKPFAVWAAECGIPGVSVAEALKRVDFWIADGFASSKEHRELQKGVKDRLKRKVSDPEIDNRSMESVAWMARELAHRVQYYFDEKHTGTKVRVFRGSLTSAARKASGFESRVNFIGGNGKTRLDRRHHAMDAATVAMLRNSVAKTLVLRGNIRASERAIGAAETWKSFRGENVADRQIFESWSENMRVLVEKFNLALYNDEVSIFSSLRLQLGNGKAHDDTITKLQMHKVGDAWSLTEIDRASTPALWCALTRQPDFTWKDGLPANEDRTIIVNGTHYGPLDKVGIFGKAAASLLVRGGSVDIGSAIHHARIYRIAGKKPTYGMVRVFAPDLLRYRNEDLFNVELPPQSVSMRYAEPKVREAIREGKAEYLGWLVVGDELLLDLSSETSGQIAELQQDFPGTTHWTVAGFFSPSRLRLRPVYLAQEGLGEDVSEGSKSIIAGQGWRPAVNKVFGSAMPEVIRRDGLGRKRRFSYSGLPVSWQG

SEQ ID NO: 89 - protein, 1361 aa, Anaerococcus tetradius
MGNYYLGLDIGTNSVGWAVTDENYNIERFKKKNMWGIRLFDEAKTAESRRIHRQARRMRQRKIQRLNLLMELFDVEISKVDESFFIRKKESDLHYEDKSQDSRYALFNDKEFNDKDYHNKYPTIFHLIMDLIENDEKKDIRLLYLACHYLIKNRGHFIFEGQKFDVNSSLNNNINKLKSHLDQFYNICLDFDNDKLIEILVNQNLNISEKSKKIKELLRKTNLEVGIANLIAGGSIKLSNMFDDDELKNLDYNSLSFKNSNFDEGRELFEEVLEDRFELVEILKDIHDASVLETMLSSASISPDGGKYISSSMINSYNKHKRDLKLLKKIIKKYKKSEYDNIFRDENIKNNYLSYTRTGINKNKKVQAEDNTDSDGFYKYIVKILKDIKENDSDEDIKYILSEIDKKNFVPKQRTKENSVIPYQLREIELRKIIDNQSKYHKFLNEVDEKGISVKEKIISLLTFRIPYYIGPLNPSYNEEKNFTTSWVKRLAKGKVTPWNFEDMVDIDASREAFIENKLNKCSFLLDETVLPKDSLLYQEYMVLNELNNLKINGQSINTDLKKSIYEELFKKYKKVTRKRLISYIKEKENMSGDIVITGIDGDFKQGLKSYIAFKDIIGEKIDDDIYRKEVEKIIRDISLYGDDKSFIQKKIKNENKLDLSDDQISKIAKLKFKDWGRFSKKLLVGIKASDKNTGEIDNIIGFMRNYNYNIMQLMANVFTFKDEIEKLNSKYYTDEKINIDYLDDLYLSSPAKRMLWQSFQIVDEIKNIKNSDPKKIFIEMARSKEDKPTRKMSRKSRLEKLYTDSKKQFIKLFGPDEYDKLNNEIKNKSESDFRWDNLYLYYTQFGRCMYSLDPIDLEELSNKNLYDQDHIYPKSKIYDDSIENRVLVKKQLNLDKSNEYPIPDRVLNKDKNKLLAFWKMLNEKELIGDKKYARLIRKSPFTDEELGDFIARQLVETRQATKETANMLKRLCPDSKIVYVKAKNVSDFRRKFDILKCRSINDLHHAHDAYLNIVVGNVFDTKFTSNPLNFIKNNSKNRSYNLEKIYDYDVIRNEKIAWLAERKEENQDGSIATVLKNLSKNDIRVTRRTYIKCEDLFDENIVRKGNGKFPIKENNNKSDTNKYGGYSGIKNAYFVLLEDEKHNRILEAIPSFIYKKEKNGEKGSVINYLQNILGIKSAKILRDKIKIGSLLKIDKFPYNLAGKSGNGILISGGVQLILDKNTSKYIKKIENYKYKLDENKDYQINIFDKLSKEENIKLFDLFVDKFENSIYKNRVNIKLKEIKLARPKFEHLSIEEQIKTLTQMLILFGRENNAVNLEYIGLPKNTGKTKINKKINNKDIKIINQSITGLYETEEDLANI

SEQ ID NO: 90 - protein, 1377 aa, Lactobacillus brevis
MESNHDGEQVKYTLGLDIGTSSIGYAAIDKHQKPIRAKGKHVIGVRLFQEGQTAADRRAFRTTRRRLKRRKWRLNLLNRLFDPYLSEVDPNFLPRLRQSNLSPKDDNKHFNGSTLFPDKTDAAFYRQYPTMYHLRYALMTEKRKFDIREVYLAIHHIVKYRGNFLNSATVDSFKTSNIDFTSQFDRLNELYRQVILDEPFQINMDQVDEMTNKLLDNDALKLDTQKQVAKLLPVIYNDKPIDKQYTRIATEFSKAILGYKTKLDVILNLDTQNAKDWVIRLDDEDIDDKLPALVENLDESRQEIVTIIRDLYAQITLNAIVPKGKSLSESMVDKYNDHKDHLDLLMGLIHELGDDSAKGIKLREAYTQYVGKSDDKTLNQDDFYAAIKKNLDEDSKRSPKIQRLIEQASFMPKQRTSANGVIPHQLHQLELDRIIENQGRYYPFLKKPNPNTHKPNGGKYKLDELVAFRIPYYVGPLITKRDQEKTSGADFAWMIRKPGQEGEITPWNFDQKVDRMASANRFIRRMTTKDSYLVAEDVLPDASLIYEKFKALNELNMLKVNDSRLSPSQKQDLFNNLFKKQKTIRTKKLQTYIRTNWELPSVMISGLADPDKFNSSLSTYIDFRDIFGEKVDDPNRQADYEEIIEWSTVFEDRKIYQAKLNQLDWLTEPQRKALLTKRYTGWGRLSKKLLTGLKDQNGDSILDQLWKTNDNFMQIQSRDEFAKQIHDENAKQFHEANNVDDILDDAFTSPQNKKAIRQVDKVVQDVVKAVGYAPDKIAIEFTRSLENNPQRTVSRQRQLQAAYKNIPREIMKSGLMAELGSVADSKKVLSDKLYLYFTQMGKDMYEDKTINIDNLPNYDIDHILPQAFIKDDSIDNRVLISKEENARKSNRVPLKFFGAKRMGFWKDLLNNGLISNRKFQNLTTDPEKISKYSAKGFIHRQLVETSQVIRLVANILGNEYSQAGTTIIEVSAKMNRQLREDFHLIKNRNVNDYHHAMDAYLTAYVGDYLYLRYPKLRPYFVYGDFKKAEDQDLNIRNFNFLHDLKDNESLDKIVDSETGEIVWEKHGSVKQLKKVYHYKFMLVSQEVYTRQDALFNQTIYPASDADKRKLIPIKNSKPVDVYGGYSGNIDAYMAIVRVHGKKEDNYKVVGIPMRAVTKLKKAEKEGHDSYLNAVHEVLKPQFTKKKKNRKTGEITETVDEFDVLLGKVYYRQLIVDGNKKFMLGSSSYQYNAKQLVLSDKAMQVLSKNGKVKSQDENQNLIDVYDEILEKVDQYFELYDQRHYRESLHKGRGIFVNLPLSNQYDGSKLTSYGKYETIDAILNGLHANATMSNLRYLGISSPFGKMQASNGLTIDPDSIICYQSPTGLFERQIKLSDL

SEQ ID NO: 91 - protein, 1239 aa, Lactobacillus buchneri
MTEKRKFDIREVYLAIHHIVKYRGNFLNSATVDSFKTSNIDFTSQFDRLNELYRQVILEEPFQINMNQVDKMTNKLLDNDALKLDTQKQVAKLLPVIYNDKPVDKQYTRLATEFSKAILGYKTKLDVILNLDTQNAKDWAIRLDDEDIDDKLPALVENLDESRQEIVTIIRDLYAQITLNAIVPKGKSLSESMVDKYNDHKDHLDLLMGLIHELGDDSAKGIKLREAYTQYVGKSGDKTLNQDDFYAAIKKNLDEDSKRSPKIQRLIEQASFMPKQRTSANGVIPHQLHQLELDRIIENQGRYYPFLKEPNSNTHKPNGGKYKLDELVAFRIPYYVGPLITKQDQEKTSGADFAWMIRKPGQGGEITPWNFDQEVDRMASANTFIRRMTTKDSYLVAEDVLPDSSLIYEKFKVLNELNMLKVNDRRLSISQKQDLFNNLFKKQKTIRTKKLQTYIRTKWELPSVMISGLSDPDKFNSSLATYIDFRDVFGEKVDDPNRQADYEKIIEWSTVFEDRKIYQAKLNQLDWLTESQSKALLTKHYTGWGRLSKKLLTGLKDQNGDSILDQLWKTNDNFMQIQSRDEFAKQIHDENAKQFHEANNVDDILDDAFTSPQNKKAIRQVDKVVQDVVKAVGYAPDKIAIEFTRSPQDRPQRTFSRQRQLQSTYLNVAKALMKSNLNQELKSVIDSQQTLTDKLYLYFTQLGQDMYTGKEINFDELVNYQIDHILPQAFIKDDSLDNRVLVSAPINNAKSDNVPVKKFGAKMGYFWKQLAENHLISKRKLNNLTTDPDKIGKFTAQGFIHRQLVETSQVIRLVANILGNEYGHDGTTIIEVTAKMNHQMRKDFDLIKIRDVNDYHHAMDAYLTAYVGDYLYLRYPKLRSYFVYGDFKKLKDQSLKIRNFNFLHDLTNDEAGDKIVDQETGEIIWDKHESVKQLKKVYHYKFMLVSQEVYTRQDALFNQTIYPASDADKRKLIPIKNNKPVDVYGGYSGNVDAYMAIVRIHGKKEDKYKVVGVPMRAVADLKKAESKGRDNYLNAVHEVLKPQFTKKKKDRKTGEITEMMDDFDVLLGKVYYRQLIVDGNKKFMLGSSTYQYNAKQLVLSDKAMQVLSKDDKLKNQDENQNLIDVYDEILEKVDQYFELYDINKFRQKLHDGRKKFIELPVDNDFNGKKLISYGKRATIISILNGLHANATMSNLKYLGISSPFGMLQVPNGIILSPASRICYQSPTGLFERKVKLSDL

SEQ ID NO: 92 - protein, 1381 aa, Lactobacillus fermentum
MDYVKEYHIGLDIGTSSIGWAVTDSQFKLMRIKGKTAIGVRLFEEGKTAAERRTFRTTRRRLKRRKWRLHYLDKIFAPHLQEVDENFLRRLKQSNIHPEDPAKNQAFIGKLLFPDLLKKNERGYPTLIKMRDELPVEQRAHYPVTNIYKLREAMINEDRQFDLREVYLAVHHIVKYRGHFLNNASVDKFKVGRIDFDKSFNVLNEAYEELQNGEGSFTIEPSKVEKIGQLLLDTKMRKLDRQKAVAKLLEVKVADKEETKRNKQIATAMSKLVLGYKADFATVAMANGNEWKIDLSSETSEDEIEKFREELSDAQNDILTEITSLFSQIMLNAIVPNGMSISESMMDRYWTHERQLAEVKEYLATQPASARKEFDQVYNKYIGQVPKEKGFDLEKGLKKILSKKENWKEIDELLKAGDFLPKQRTSANGVIPHQMHQQELDRIIEKQAKYYPWLATENPATGERDRHQAKYELDQLVSFRIPYYVGPLVTPEVQKATSGAKFAWAKRKEDGEITPWNLWDKIDRAESAEAFIKRMTVKDTYLLNEDVLPANSLLYQKYNVLNELNNVRVNGRRLSVGIKQDIYTELFKKKKTVKAGDVASLVMAKTRGVNKPSVEGLSDPKKFNSNLATYLDLKSIMGDKVDDNRYQMDLENIIEWRSVFEDGEIFADKLTEVEWLTDEQRSALVKKRYKGWGRLSKKLLTGIVDENGQRIIDLMWNTDQNFMQIVNQPVFKEQIDQLNQKAITNDGMTLRERVESVLDDAYTSPQNKKAIWQVVRVVEDIVKAVGNAPKSISIEFARNEGNKGEITRSRRTQLQKLFEDQAHELVKDTSLTEELEKAPDLSDRYYFYFTQGGKDMYTGDPINFDEISTKYDIDHILPQSFVKDDSLDNRVLVSRAENNKKSDRVPAKLYAAKMKPYWNQLLKQGLITQRKFENLTMDVDQNIKYRSLGFVKRQLVETRQVIKLTANILGSMYQEAGTDIIETRAGLTKQLREEFDLPKVREVNDYHHAVDAYLTTFAGQYLNRRYPKLRSFFVYGEYMKFKHGSDLKLRNFNFFHELMEGDKSQGKVVDQQTGELITTRDEVAKSFDRLLNMKYMLVSKEVHDRSDQLYGATIVTAKESGKLTSPIEIKKNRPVDLYGAYTNGTSAFMTIIKFTGNKPKYKVIGVPTTSAVGLKRVGKPGSESYNQELHRIIKSNPKVKKDFEIVVPHVSYSQLIVDGDCKFTLASDTYQHPATQLVLSKESMEIIADDFKFVKENPATADEQLVRVFDEIVNQMNHYFTIFDQRSNRQKVTKARDKFVSLPTESEYEGAKKTQVGKTEVITNLLMGLHANAAQGDLKVLGLSTFGFFQSSGGLNLSEDAMIVYQSPTGLFERRICLKDI

SEQ ID NO: 93 - protein, 1306 aa, Sphingobacterium spiritivorum
MKHILGLDLGTNSIGWALIKQNFENKQGEILGMGSRIIPMGAELSKFEQGQAQTKNANRRIARGTRKLNKRYKQRRNKLIYILQGLGMLPDQIKLVNQFSDPNKLDKISILPISKNQQQLTAFDLLELRVKALTEKIELEELGKVIYKYNQLRGYSGGNSEPEKEENNEDESEENEKTNDSFVVFSKVLSLGLPEEITFKGKKLSKRKIAIETEDGIIEAETFLDSLKENDSLELHVNIRRAKSGDTITIKLPSKTSWRKKMENIEKQLADKSKELGREYFISELLFDILKENKWAKIRNNVILRSRYESEFDAVWSEQSKYYPILNHLETDRLQKILEFIFPGQKESQEKLRQTGLKEGLKYVIKNQVVFYQRELKDQSDLISNCRYEPTEKVVAKSHPVFQEYKIWEQINKLVINTKIENGVNRKGEIRYKYIDKPIPVALKEWLYEELQSKKEVSFNPILTKLKKEFKLRENVDFLNGMNAKDKLKGNETKVILQKALGELWNIFGLDDSERQVELWEILYNGKGNEYDLTSERTSNILAFIEKYSPDLENKNDVAIKISKIKFSRNYSNLSLKAIDNILPLVRAGKFFDQNFSEALSHKIVKLLNENVEDPFEKSAQEFLDKNQDVLSDGGIVNAIATILVYDKHTAKEYSGDELIKEFTQISRLKQGELRNPLAEQIINEALVIVRDIWRKYGFKPDEIRVELARELKNNAVERGKMYSANLKSQKHNAEIRNKLIELKQEISIANIEKYKLWVSQENLQEVYLKNYNDPSKSEIEKLKLWESQGHISPYTGQPISLSELFNRERYDVDHIIPQSRYFDDSLSNKVICEKSINNEKGNRTSMEYFEVGSVNYRIFTKDQFIDHANKYFSGKKRKNLLATSIPEDPIQRQIKDTQYISIRIREELNKIVGNENVKTTTGGITDYLRNHWGLTDKFKVLLKERYEAVLPKIAQLEYDNYKKETEKKFTEYKNADVEFNEPILDEEIFIEKFRSEFIRKKNNKLIIKGWSKRIDHRHHAMDALVIACTQPAHIKRLNDLNQVLKEWLDKNKEKFFPGFSGTKTELLDEVLNLEEEKRREIFNQLEKFRAIEMPWKGFPEEAEQKLKEVIVSHKPKDKLLLQYDIQGNKQIKLRGQLHEGTLYGLSNGKEIYRIPINKLAGKQFATEKTIEKIVNPFLKNVIEEHLKSFGKKEEAFSAEGILDLNKKLAERKDEQQNPKPHPPISTIKIYYKDPSKSKKKKTDDEDDISLQKLNRKKSFNDSLYVKTGDNYLFAVMEKEVFNKKLNKDKTERHYDLKLFLTLLIF

SEQ ID NO: 94 - protein, 1358 aa, Acidaminococcus sp.
MGKMYYLGLDIGTNSVGYAVTDPSYHLLKFKGEPMWGAHVFAAGNQSAERRSFRTSRRRLDRRQQRVKLVQEIFAPVISPIDPRFFIRLHESALWRDDVAETDKHIFFNDPTYTDKEYYSDYPTIHHLIVDLMESSEKHDPRLVYLAVAWLVAHRGHFLNEVDKDNIGDVLSFDAFYPEFLAFLSDNGVSPWVCESKALQATLLSRNSVNDKYKALKSLIFGSQKPEDNFDANISEDGLIQLLAGKKVKVNKLFPQESNDASFTLNDKEDAIEEILGTLTPDECEWIAHIRRLFDWAIMKHALKDGRTISESKVKLYEQHHHDLTQLKYFVKTYLAKEYDDIFRNVDSETTKNYVAYSYHVKEVKGTLPKNKATQEEFCKYVLGKVKNIECSEADKVDFDEMIQRLTDNSFMPKQVSGENRVIPYQLYYYELKTILNKAASYLPFLTQCGKDAISNQDKLLSIMTFRIPYFVGPLRKDNSEHAWLERKAGKIYPWNFNDKVDLDKSEEAFIRRMTNTCTYYPGEDVLPLDSLIYEKFMILNEINNIRIDGYPISVDVKQQVFGLFEKKRRVTVKDIQNLLLSLGALDKHGKLTGIDTTIHSNYNTYHHFKSLMERGVLTRDDVERIVERMTYSDDTKRVRLWLNNNYGTLTADDVKHISRLRKHDFGRLSKMFLTGLKGVHKETGERASILDFMWNTNDNLMQLLSECYTFSDEITKLQEAYYAKAQLSLNDFLDSMYISNAVKRPIYRTLAVVNDIRKACGTAPKRIFIEMARDGESKKKRSVTRREQIKNLYRSIRKDFQQEVDFLEKILENKSDGQLQSDALYLYFAQLGRDMYTGDPIKLEHIKDQSFYNIDHIYPQSMVKDDSLDNKVLVQSEINGEKSSRYPLDAAIRNKMKPLWDAYYNHGLISLKKYQRLTRSTPFTDDEKWDFINRQLVETRQSTKALAILLKRKFPDTEIVYSKAGLSSDFRHEFGLVKSRNINDLHHAKDAFLAIVTGNVYHERFNRRWFMVNQPYSVKTKTLFTHSIKNGNFVAWNGEEDLGRIVKMLKQNKNTIHFTRFSFDRKEGLFDIQPLKASTGLVPRKAGLDVVKYGGYDKSTAAYYLLVRFTLEDKKTQHKLMMIPVEGLYKARIDHDKEFLTDYAQTTISEILQKDKQKVINIMFPMGTRHIKLNSMISIDGFYLSIGGKSSKGKSVLCHAMVPLIVPHKIECYIKAMESFARKFKENNKLRIVEKFDKITVEDNLNLYELFLQKLQHNPYNKFFSTQFDVLTNGRSTFTKLSPEEQVQTLLNILSIFKTCRSSGCDLKSINGSAQAARIMISADLTGLSKKYSDIRLVEQSASGLFVSKSQNLLEYL

SEQ ID NO: 95 - protein, 653 aa, Oribacterium sinus
MELINSEEFTFKEELEKHTQVAMKQLSEFTYEDLEDSYFSVPVKRMIWQTLLVVREIEKVMGYAPKRIFVEMTRTEEEKGDKGRKESRGNQLLELYKSIKNTDSHNWKEEIAAADKDGKLRSKKLFLYYMQMGRDMYTGEEIDLGRLYDDNLYDIDHIYPRHYVKDDSIMNNLVLVNRRANQDIKKDLYPIPEQIKANPNVHMLWDALHKQKLITDEKYARLTSNTAFSEKQLGDFIARQLVETGQGTKGVADLLEQLFKDTVIVYAKASNVSDFRRDNGFLKSRLVNDFHHAQDAYLNIVVGNVYYTKFTKNPWNFICKDYEKDKEKNRYNLARMFDWNVVRGSETAWIVERKDEKGTISTVRKMMQKNTPLLTRMNFEQHGSIANATLYSAKKAKSENYLPLKTADEKMSDVKKYGGYTSMSIAYYFIVHHKEDKKENVTIEALPLYCKDKVEREENGLEKYCEEVLGYGEVNIIRRKLKIQSLLEFNGYQVHLSGKTGNQLILRNAISLCLSTKWITYIKKLEKAVNIQIVEEVVTPEENIKLYNLLADKHANTVYSKRPNAYGEKLLADREIFVTLEFGKQCEALLQILSLTKIGSTEANLLLIGESEHSGKILISKNLKASDRPAVINQSPCGLYEKKEWIFDKIVEK

SEQ ID NO: 96 - protein, 1436 aa, Capnocytophaga gingivalis
MKYIKYILGLDIGSNSIGWALIQLDLLQKTKRIIAAGSRIIPMDQKVLSDFGKGITISPTAQRTSYRNARHCRERHLLRRERLHRVLHILGFLPTHYDKQIDFSKRYGKFVDNTEPKIAYNEGKFLFMDSFQEMLSDFKSHQPDLFYTKKNGEESKIPYDWTIYYLRKKALSQKISKEELAWIILNFNQKRGYYQLREEEGNKENDFEIISSKIISVIKKDKDKKYNKYWYDIILENGLVYQAAFYNDFVYNWINQDREFIIERTSLKNGAEKVKLSYLPTFDEIDKMDKKEQDKYYKKIKIKTENSIGNKTVGCYIYDHILQNPNEKIKGKLVRTIERKYYKEELKAILEKQIALQPELFTDQLLADCIRELYSKNEAQQRNLAARDFVHLLVEDIIFYQRPLRRQKSTLANCSLESRSYIDKDSHTRKEAPLKVCPKSNPYYQEFRVLQWLQNLKIYEIDSDQEVTHQFIKTLEDKQQLFEFLMAQKEIDCEELLKYFLNQTYPNAKEKALKSELKKWKDTYRWNYVYDIGEKSSKKYPMNETRYELKRHLEKVANLPDDFLSSEVEYLLWHLIYSVKDKVAYEKGLKKFAQKHHLDKDSFVESFKKFNPYPSEYGSFSEKAIRKLLPLMRFGAHWDFNHIDKNTQKRIEDLITGVENEEIRTILREKAEKYQLEKETDFQDLPLWLAQYIVYNRHAEASSLEKWTSVNDLETYLNEFKQHSLRNPIVEQVVMETLRVVRDIWQQYGQGQASFFNEIHIELGRELKKTAKEREKLSKQNQKNEDINLSIKEKLKELEKYNTRAYSITHQEKYKLWLEQKHISPYTGQIISPENLFTDNYEIEHIIPQSRFFDDSLSNKVVCESIVNKAPYKDRQLGLEFIKNQGGRIVKELSKENKTIKIFTEEQYRTFIKEHYSNNPEKTKKLLLEEIPEKMVARQMNDTCYISKFISEILSKIVRSDEQDEGVHSKNVILCTGKITSILRQDWGLNDIWDNLILPRFERMNNLLQKEKFTIYSIEKQKKIPVVPINDQFKSFQKKRIDHRHHAMDAIIIACTTREHINYINNQHALEKEKDKKEKQEERDKLREKLCIKKYNNRSEGNYSWIFKKPWDTFTQEVRVALEDIVVSFKQNLRVINKATNYYERWVEENGKYIKKMVKQEGTNWAIRKPLHEETISGKIYLDREKITKNDILTATRKTVDSSFDDKRIKKITDTGIQKILLNYLKYKGSPEIAFSPEGLEELNKNLSIYNDGKPHKPIYKVRIYEKGSGRFALGEKGRKYKKYVQGASNLYFGIYQGAKRSFATIPLNEVIERQKQGLPSVPEYNEKGDLLLFSLSPNDLVYVPIEGEIIENIDFRNLSKEQKERIYNVNDFSSTCYFTPNRIAKAIFPKEVDLQRKGDKLSGSYDTKTASLEGIQIKEVCIKLKVDRLGNISKA

SEQ ID NO: 97 - protein, 1069 aa, Bacillus cereus
MNYDIGLRIGITSCGWSIINKDLERIEDLGVRVFEKAENPDGTASAAPRREARKSRRKHRRKKHRIERIKRLIVQHDLLSKKELDSLYLSPFNIDVWNLQVEALERKLDNREFARVLIHLVQRRGFQTIRKSVEIQEEGKLLENVSENERIMKVNGYKTVGEMFSKHEKFTHHKRNKDGSYTSVVTRSLLLKEIKTIFNSQRILGNVFSTQKLESDYLYIWGSQRPTLTYEQLMSMVGNCIYEKKEKRAPKTSWAFQYFSLLQKINKLKVSDDNTLRKLSKEERDIVIELAFKKKNVSFVDIRKALKLNDNTKFNHLTYSHVVETKKVEKATFIELKGYHLIKKQLKDRNVELTQELQPKDYDAIAAASTFFKNDIEFRDYLRNQYLDSNGKRKSNIANKVFEDKVIAAVFELNFSKVCHLSFKSLYKLIPHLEKGLDYKEAILCAGYNFRDENKRDKKLFLPVIQQETNPVVHRALTQARKVINAIIREYGSPNTIRFVVANDLAKTYKQRKELESTLKKNRAENEKIKTKLLSMGIINPTGMDIVKYKLWYEQSGICLYTGRQMELSSLFKPGYSIVNHIIPYNRSFDDTYHNRVLTLTETKYEKGNKIPFEYFGAEETCWNEYEKRVSTSKKIHDKKREKLLIRNFDIEYENEMISNNVFDTHYIGSYFEKYIDEHLQFKKSTKKQKVFSIHGNMVAHLHSRWGFNKNSREIYLNHAVDAAIVAVLTDQLIRNIADYYRRDNILEQKGSLKFPEPWKSFSIELEARISPQVRDLIKKLNLDSYLDVDILHIKPVFISKKPRRKVNGEAHKSTIRSLIGINEIGKTVTCIKTRLEDIPFDENGDFPMYGKDTDKYTYTAIKERYLEFNKDKEKAFSTPLYKLKRNGEPGNQIKSVKIIDTRNIVNKVNQGKGIAYNSNIIRVDVFSRDQKYYVVPIYLRDFIKGSLPNKIITAAKGFMQWPETDNSYTFLFSIFPNDLIKVVPKEGKFIKAKNENKENINLTEILGYFKGLDSSTGAFTLESHDGSLLARGIGTKNLLLIEKYQVDVLGRYNKVGNEERQDIKIQQN

SEQ ID NO: 98 - protein, 1391 aa, Lactobacillus jensenii
MKEIKDYIIGLDIGTNSCGYVVTDKQNNILKLKGKTAIGARLFKEGEAAADRRAFRTTRRRLARRRWRLSLLEEIFDEEMNKVDPSFFRRLKESDYSPKDRRKQFNSIVFESSEADKAFYEKYPTIYHLRNALMHDNQKHDLREIFLAVHHIVKYRGNFLREDSVKAFKAAKFTLQGEDGIGPVDKLNDLLKEIYIEAAPELATDNLSKIEDIIKDKKLYKQDKLKQIANLLPKAVDSKDKAKLNKDIAKQVANALMGYMFRLDTLFSFTDVDVKDYKLKFSDANIDESLDALTSLLTDAQIEFVLELQSIYNTIVLNEIVPDGMSLSESMVKKYDDHKKDLKLYKEYIDSLSDQKKAKQLEAAYALYVNYRKADLLAAKKLFEKKKIGDKKFVDVISNFEVFGKFVSDNLDDSELANKIKARLDLGEFLPKQRTNQNGVIPYQLHQVELTQILEKQGKYYPFLITPNPVESHRNNAPYEISELVSFRVPYYVGPLIDNQSIKDKQNKNKFAWMVRQKQGQITPWNFEEMVDTTESANQFIKRMTRKDTYLLAEDVLPKSSLIYQKFMILDELNRIKIDGKKLTSKLKHDIFEKLFKKQKSINLDNLKNYLLAEGNIPGLIEGLSDGINFNNSFSTYIDYRNIFGDEIDNPNKQADFEKMIEWSTVFEDRKIFKRKLKEITWLTPEQIKQVSSKRYSGWGRLSKKLLTQITDENGVNILQRLWNEPETLTEVLANPVIKRKISEANSLFVQINKVENILDDAYTSPQNKKAIRQVIRVVDDIIAAAHGKKPSQIAIEFARSSQNKAKVPDTRKKQLDKIYNKISSEILDSSIKNELKNLKSNKYLSKDKLFLYFKQMGRDAYTGDKLSLDQLQNYDIDHIFPRSFIKDDSLDNRVLTQKPINAKKSDYGIPALEFGNKYVPDLGITVKEMWKLWQENGLISKSKLINLCTNPKKIGSKRASGFINRQLVETSQVIKLVAIILQAEFPDTEIIEVKALQNTTLRESFHLYKNRSVNDYHHAIDAYLTTIVGNYLYQVYPKLRPYFVYGQFKKFNQEKNIDILKRLKNFNFLRQLIFNTDDNIYISGTKEIVFNKKDIIHKLETAYGYKYMNISRECYQETSSLFNQTLYAHNSSVKNSLIPKKKGLPTEIYGGYSGNKDSFFVLVKIVKKRTNLYRIVGIPTRELAKLNSSNNYNQALNKIVESKLCLKETESFKILIKRLLYGTLIVDNGQKFRIGSFKEKHNVQQLVLQLKSMKYIKFYIDGGQNYFTDVERKKLEKQDRDKCLLYVFDDIMNVVNKRFTLFDMSKYEKDGDSLREKFNCLDFNDKVSILSDLLKAFHANSDRTSITKLKITNLGRHQAGKNGITLTTNAQIIYQSPTGLFERRIKIKDL

SEQ ID NO: 99 - protein, 1114 aa, Eubacterium rectale
MNYTEKEKLFMKYILALDIGIASVGWAILDKESETVIEAGSNIFPEASAADNQLRRDMRGAKRNNRRLKTRINDFIKLWENNNLSIPQFKSTEIVGLKVRAITEEITLDELYLILYSYLKHRGISYLEDALDDTVSGSSAYANGLKLNAKELETHYPCEIQQERLNTIGKYRGQSQIINENGEVLDLSNVFTIGAYRKEIQRVFEIQKKYHPELTDEFCDGYMLIFNRKRKYYEGPGNEKSRTDYGRFTTKLDANGNYITEDNIFEKLIGKCSVYPDELRAAAASYTAQEYNVLNDLNNLTINGRKLEENEKHEIVERIKSSNTINMRKIISDCMGENIDDFAGARIDKSGKEIFHKFEVYNKMRKALLEIGIDISNYSREELDEIGYIMTINTDKEAMMEAFQKSWIDLSDDVKQCLINMRKTNGALFNKWQSFSLKIMNELIPEMYAQPKEQMTLLTEMGVTKGTQEEFAGLKYIPVDVVSEDIFNPVVRRSVRISFKILNAVLKKYKALDTIVIEMPRDRNSEEQKKRINDSQKLNEKEMEYIEKKLAVTYGIKLSPSDFSSQKQLSLKLKLWNEQDGICLYSGKTIDPNDIINNPQLFEIDHIIPRSISFDDARSNKVLVYRSENQKKGNQTPYYYLTHSHSEWSFEQYKATVMNLSKKKEYAISRKKIQNLLYSEDITKMDVLKGFINRNINDTSYASRLVLNTIQNFFMANEADTKVKVIKGSYTHQMRCNLKLDKNRDESYSHHAVDAMLIGYSELGYEAYHKLQGEFIDFETGEILRKDMWDENMSDEVYADYLYGKKWANIRNEVVKAEKNVKYWHYVMRKSNRGLCNQTIRGTREYDGKQYKINKLDIRTKEGIKVFAKLAFSKKDSDRERLLVYLNDRRTFDDLCKIYEDYSDAANPFVQYEKETGDIIRKYSKKHNGPRIDKLKYKDGEVGACIDISHKYGFEKGSKKVILESLVPYRMDVYYKEENHSYYLVGVKQSDIKFEKGRNVIDEEAYARILVNEKMIQPGQSRADLENLGFKFKLSFYKNDIIEYEKDGKIYTERLVSRTMPKQRNYIETKPIDKAKFEKQNLVGLGKTKFIKKYRYDILGNKYSCSEEKFTSFC

SEQ ID NO: 100 - protein, 1362 aa, Lactobacillus paracasei
MTKLGKPYGIGVDIGSNSIGFAAVDENSHLIRLKGKTVIGARLFEEGKAAAKRRAGRTTRRRLSRNRWRLSFLRDFFESHITPTDPNFFMRQKYSEISPKDKARYKYEKRLFNDRTDAEFYQQYSTMYHLRNRLMTDPSRADVREIYFAIHHILKSRGHFLTPGDAKDFNTNDVALDEIFPALQDAYAQVYPDLGITFDEDKANEFKTILLNEIATSIDTQRALVKLLLAEEDDKDILKQQKQVLTEFAKAVVGLKTKLNLALGTEVDSSEATAWNFSLGQLDDKWAGIESAMTDEGTEILDQIRDLYRARLLNGIVPTGKTLSQAKVDDYTQHHEDLQLFKAYLKQLEDDGTAKAIRQLYDRYIDGDDAAPFLRENFVKALTKDVTAHPNTKSPELLERLAQPDFMLKQRNKANGAIPVQMQQRELDQIIKNQAVYYDWLAAPNPVEKHRKSMPYQLDELLNFRIPYYVGPLVTAKEQKAAQGGVFAWMVRKDPEGNITPYNFDEKVDREASANTFIQRMKTTDTYLIGEDVLPKQSLLYQRYEVLNELNNVRVNNEKLSIEQKQQVIRELFERHNSVTIKQFAENLRAHGDYAHIPEIRGLADEKRFLSSLSTYRQLKSLLPEAIDDPAKQADIENIIAWSTVFEDAAIFKTKLKEISWLGSEAITKLSNIRYRGWGQFSRKFLNGLTLGNGHTIIQELLLSTNNLMQILTDETLQKKMTELNADKLKTANINDAIDNAYTSPSNKKALRQVLRVVDDIKRAADGQDPSWLYVETADGGGTPGKRTRARQHQLQEIYANAAHELIDTAVRGELEDKISDKADFNDRLVLYFMQGGRDIYTGAPLNIDQLSSYDIDHILPQSLIKDNSLDNRVLVHAIINREKNATFASTIYAQKMNATWRQWHEAGLISGRKLRNLQMRPDQIDKYASGFVARQLVETRQIIKLTEQIVAAQYPDTKIIAVKAGLSHQLREELEFPKNRDVNHYHHAFDAFLAARIGTYLLKRFPNLQAFFTYGKFTKADVKKLRGFNFIRDITHAEDKIVAKDTGEVVWDKQRDVDELDRIYNFKRMLITHEVRFETADLFKQTVYGARDSKEAGGSKQLIPKKKGYPVDIYGGYFRENTAYLAVVKVTKKTETIFKVVKIATSQVAALNKARSRSTAEELSVLTELLKPKFSKVGKNGKITDTPFEVVLPRVPREQLFYNAKYGFFMVNSDTMFHNFQEIWVSRSDQKILQQIRKAKIDYPNVDQDLDNLFHNLADQIVKYFDLYSIAGFKEKISQSQNTFNDLAVDDTDQSVGKITVINELLKGAQANGMTGSLKVLKISTPFGFTQDKSGVLTKDSSIIYQSPTGLFERSVRLTDL

SEQ ID NO: 101 - protein, 1056 aa, Actinobacillus minor
MKALNYILGLDLGIASVGWAVVEIDQNELPIRLIDLGVRTFERAEVPKTGDSLALARRLARSSRRLVRRRAVRLLKAKRLLKQEGILQADDFHSSHLKPLPNNPWELRVKGLNHLLDRKEWAAVLLHLLKHRGYLSQRKNESKTDNKELGALLKGVSENRQLLQAQAFSTPAEIAIKKFQQEEGHIRNQRGAYSHTFDRNDLLAELRLLFQKQREFNNPYTSQSLEQAIAELLMWQKPALSGEAILKMLGKCTFEPSEYKAPKNSYSAEYFVWLTKLNNLRILENGADRGLTAEERQLLINQPFEKAKFTYAQARKLLELSDLAIFKGVRYGKDNAESATLMEMKAWHAIRKALESNGLKTEWNGLKTKPELLDKIGTAFSIYKTDEDISQYLNGELSPAVLNALLENLSFDKFIRLSLQSLAKILPLMEQGLRYDEACKQVYGDHYGKKEQLELRFLPKIPVEDIRNPVVLRTLSQARKVINGVVRLYGSPARIHIETGREVGKSFSERRDISKRQEENRNERQRAVEKFKEFFPHFVGEPKAKDILKMRLYEQQHGKCLYSGKELDLNRLLEKGYVEIDHALPFSRTWDDSFNNKVLVLASENQNKGNQTPYEWLNGKENAERWKLFQALVNGSRFPYSKKQRILTKYLDEDGFRERNLNDTRYVARFLCNFIEDNMQLVGQGKKRVFASNGQITALLRRSWGIQKVREDNDRHHAVDAVVVACSTRALQKKITDYVRYKEMNVFTGEKIDQETGEIIKFHFPEPWKFFRQEVEIRVFSETPAEDVVIALPDRPQANHEFIQPLFVSRAPTRKMTGQGHMETIKSAKRLAEGLSVSRVPLTQLKLKDLENMVNREREKALYEALKVRLEKFNNDPAKAFADPFYKKGGQQVKAVRVEQVQKSGVLVRQENGVADNASMVRVDVFIKGGKYFLVPIYTWQVAKGILPNRAATQGKEEEYWDIMDETAIFQFSLYQNDLIKLVTKKKTIFGYFNGLNRATSNINIKEHDLDKSKGKDGIYLEVGVKLALSLEKYQVDELGKNIQPCRSMKKRPPVR

SEQ ID NO: 102 - protein, 1081 aa, Neisseria flavescens
MTAFKPNPINYILGLDIGIASVGWAMVEIDEEENPIRLIDLGVRVFERAEVPKTGDSLAAARRLARSVRRLTRRRAHRLLRARRLLKREGVLQAADFDENGLIKSLPNTPWQLRAAALDRKLTPLEWSAVLLHLIKHRGYLSQRKNEGETADKELGALLKGVADNAHALQTGDFRTPAELAVNKFEKESGHIRNQRGDYSHTFSRKDLQAELVLLFEKQKEFGNPHISDGLKEGIETLLMAQRPALSGDAVQKMLGYCTFEPTEPKAAKNTYTAERFIWLTKLNNLRILEQGSERPLTDTERATLIDMPYKNKLTYAKARELLGLDDTAFFKGLRYGKDNAESATLMEMKAYHAIRRALEKEGLKDKKSPLSLSPELQDEIGTAFSLFKTDEDITGRLKGCLQPEILDALLKHINFDKFVQISLKALRRIVPLMEQGKRYDEACAETYGDHYGEKNSEEMLYLPPIPADEIRNPVVLRALSQARKVINGVVRRYGSPARIHIETAREVGKSFKDRKEIEKRQEENRKDREKAAAKFREYFPNFVGEPKSKDILKLRLYEQQHGKCLYSGKAIDIRRLNGKGYVEIDHALPFSRTWDDSFNNKVLVLGSENQNKGNRTPYEYLNGKDNSREWLEFKARVETSRFPHSKKQRVLLQKFDEKGFKERNLNDTRYVNRFLCQFVADHMQLTGKGKRRVFASNGQITNLLRGFWGLHKVRAENDRHHALDAVVVACSTVAMQQKITCFVRYKEMNAFDGKTVDKETGEVLHQKTHFPQPWEFFAQEVMIRVFGKPDGKPEFEEADTPEKLRALLAEKLSSRPEAVHEYVTPLFVSRAPNRKMSGAHKDTLRSAKRFVKHNEKISVKRVWLTEIKLADLENMVNYKNGREIELYEALKARLGAYGGNAKQAFDPKDNPFYKKGGQLVKAVRVEKTQESGVLLNKKNAYTIADNGDMVRVDVFCKVDKKGKNQYFIVPIYAWQVAENILPDIDCKGYRIDDSYTFCFSLHKYDLIAFQKDEKSKVEFAYYINCDSSNGRFYLAWHDKGSKEQQFRISTQNLVLMQKYQIDELGKEIRPCRLKKRPPVR

SEQ ID NO: 103 - protein, 1392 aa, Gemella haemolysans
MANKTWYLGLDIGSASVGWAATDTGYKIIRKNKKRLWGVRLFEEAKTAEDRRGYRSSRRRLARRKWRLNLLEELFTSEVKKVDENFFLRLKESQYHYEDKTHKVPYAIFNDKDYTDKDYYKDYPTIYHLRSKLMTEENPDIRKVFLAIHHIIKNRGHFLLQGQSFKDGNLNNLIKELLELDILHVGFEVTEEVVDKIADISLEKKTSKDKLNDIKELYPKEKQLLEVFRLIFGGKTSLDKLFAIDEYKELDAAIKSVSFKEKIYEEVRHDYEQVLSNYIELLDLAKLVYDSIILSDIKKEGKTLSESKVELFEKHRDDLLKLKNLVKNDSKLSEDKKVELYALIFKEDKDKGTNYVNYIRKSEEGKGCNYEDFKKFLVKELAKLEESSVKTEIIKDLELEQFLPLQRTKDNSVVPYQIHKEELVKILDNAARYHSFLNEKDESGYNVREKVIQLLEFRIPYYVGPLNSSKKAKEGGFAWSVRNTGYENTPVTPWNYSKVIDESASAEKFITNLTNKCTYLKGEDVLPKSSLLYSEFALLNELNALKYDGNRISLEARNTIIEKLFKQQGKKVTKTSIKNLLKAEGYIDGKGEITGIDITVKNDLKSYRDFKKILGNKFNSEHVENIILWITLYGESRKLIKAKIESVYGEVYSKDEITKMSRLVYKDWGRFSRKLLTELVSKKLYNEETGECLNIIGAMRQNNILFMELLADRFDYSKQIVEFNKELQEDVTEIAPEILDDLYVSPAVKRSIWQTVRIVEELKKIIGCAPAKIFVETTRSNQEKKKPTDSRKKQLELAYKAVKKDVKELEKEIGTINFDVLNDRLSSVEPSKLKAKKLYLYYTQLGRCMYSEEPINISELFDNNKYDIDHIYPQSKIKDDSFTNTVLVKRESNAAKTDRYPLGSDIQTPSNRRFWKFLKEKGLISDEKYNRLVRTEEFSDEELSGFIARQLVETSQSVKAVASILGELNPETSICYSKAENVSSFRQNFGKIKKGDRDSKNNDQLIKVREINDYHHAKDAYLNVVVGNVYDTKFTRNVFNFIKDKKDGRKYSLNKVFYENVSDSKTVAWEMDKTIHQVEKVMNNNNIMVTRRTSEQKGGLFDATVYKAKVAAKAKDGVYYPLKTSNSVVKDVAKYGGYTSIGIAYYSIFEYTIVNKKGEEKITRIIPIPIYISQNIKDSTALIEFGKSQIFCRAYEKIKDFKLLYRKLCIGSKININNYQYYIGGKSDERFYYDSAIQVTLDKKSEKYLKILSKYQNWKKENKDGELWENITKENNIELYNKLVEKMNSEIFTKKKSNKYNELNSEEIRNNFIKISVEEQAKVLLEILNLLTNKKSIFDLKSIDIKAARGKISFNLTSLIQFSIIEQSITGFYEKEITIIGDKGNDMENNNS

SEQ ID NO: 104 - protein, 702 aa, Helicobacter pullorum
MRKILKIDERIQFKEVDYTAKNPENKKFVEFKNLKKFCEILGAIVGDRALADSIARDMTLIKDEEELAQKLRGYGKFSQEQITQLSALHFSHHISLSLKALSEILPFMREGMRYDEACQEAKLQAKHNDKKSKFLPPFCESIYADELTNPVVHRAIAEYRKILNALIAKYGSVHKIHIELTRDVGKNFQEREKYKKEIESNYKARVQAMQECEKLGLTLSEGNILKLRLFREQNEICVYSGRKITLANLKEQGALEIDHILPYSRSSDDSYMNKVLVFTNENQNKGNKTPYEAFGGDSQKWGEIESLALRSGYPKKKAKRILDKGFGDREAGFKSRNIVDSGYIARLIANYTKEYLKFLPLDSHENTALIAGEKDSKIHVEAVKGMLTATMRHFWGLGSKNRYEHTHHAVDAIIIAYINAAMIQRFSQFRQNQESLKARFYAKELAKEEFKTQRAFFEPFSGFREQVLAKVGQIFVSRPPRKRARGALHEETFYSIDDKKLSETYGGKKGVQRALSLGKIRQIGTKIVANGPMVRVDIFKHTQSGRFYAVPIYTMDFALGILPNKAVVSGKDKDRIIKDWLEMDSCYEFCFSLFKDDVIEVQKRDMEKPELAYFVSLDASDGRIKVRHHCNDITKINENQKKLFSEAIEKEVVGRGSIQNLKVFKKYKVSPLGEIKEAKYEPRQPIALKTSPKKHRKQNNAQ

SEQ ID NO: 105 - protein, 1371 aa, Streptococcus dysgalactiae
MDKKYSIGLDIGTNSVGWAVITDDYKVPSKKFKVLGNTDRHSIKKNLIGALLFDSGETAEATRLKRTARRRYTRRKNRIRYLQEIFSSEMSKVDDSFFHRLEESFLVEEDKKHERHPIFGNIVDEVAYHEKYPTIYHLRKKLADSTDKADLRLIYLALAHMIKFRGHFLIEGDLNPDNSDMDKLFIQLVQTYNQLFEENPINASRVDAKAILSARLSKSRRLENLIAQLPGEKRNGLFGNLIALSLGLTPNFKSNFDLAEDAKLQLSKDTYDDDLDNLLAQIGDQYADLFLAAKNLSDAILLSDILRVNSEITKAPLSASMIKRYDEHHQDLTLLKALVRQQLPEKYKEIFFDQSKNGYAGYIDGGASQEEFYKFIKPILEKMDGTEELLAKLNREDLLRKQRTFDNGSIPHQIHLGELHAILRRQEDFYPFLKDNREKIEKILTFRIPYYVGPLARGNSRFAWMTRKSEETITPWNFEEVVDKGASAQSFIERMTNFDKNLPNEKVLPKHSLLYEYFTVYNELTKVKYVTEGMRKPEFLSGKQKEAIVDLLFKTNRKVTVKQLKEDYFKKIECFDSVEISGVEDRFNASLGTYHDLLKIIKDKDFLDNEENEDILEDIVLTLTLFEDKEMIEERLKKYANLFDDKVMKQLKRRHYTGWGRLSRKLINGIRDKQSGKTILDFLKSDGFANRNFMQLINDDSLTFKEAIQKAQVSGQGHSLHEQIANLAGSPAIKKGILQSVKVVDELVKVMGHKPENIVIEMARENQTTQKGQKNSRERMKRIEEGIKELGSQILKEHPVENTQLQNEKLYLYYLQNGRDMYVDQELDINRLSDYDVDHIVPQSFIKDDSIDNKILTRSDKNRGKSDNVPSEEVVKKMKNYWRQLLNAKLITQRKFDNLTKAERGGLSELDKAGFIKRQLVETRQITKHVAQILDSRMNTKYDENDKLIREVKVITLKSKLVSDFRKDFQFYKVREINNYHHAHDAYLNAVVGTALIKKYTKLESEFVYGDYKVYDVRKMIAKSEQEIGKATAKRFFYSNIMNFFKTEITLANGEIRKRPLIETNEETGEIVWDKGRDFATVRKVLSMPQVNIVKKTEVQTGALTNESIYARGSFDKLISRKHRFESSKYGGFGSPTVTYSVLVVAKSKVQDGKVKKIKTGKELIGMTLLDKLVFEKNPLKFIEDKGYGNVQIDKCIKLPKYSLFEFENGTRRMLASVMANNNSRGDLQKANEMFLPAKLVTLLYHAHKIESSKELEHEAYILDHYNDLYQLLSYIERFASLYVDVEKNISKVKELFSNIESYSISEICSSVINLLTLTASGAPADFKFLGTTIPRKRYGSPQSILSSTLIHQSITGLYETRIDLSQLGGD

SEQ ID NO: 106 - protein, 1007 aa, Helicobacter canadensis
MKVLGFDIGINSIGWAFVENNELKDCGVRLFTKAENPKTKESLALPRRNARSSRVRLRRRRSRLLSLKHIISKEFGLHYEDYIALDGNLPKAYTGKIESIYKLRYEALSQAISKEDLARVILHIAKHRGYMNKNQKTSQDSEKGAILSAIKENSNKIKHYQTAGEYFYKELFENLRDGTKEFKNIRNKAMKNEKTGNMESTYYNTILASDLEKELKLILEKQQAYHNYSDTFIKEVLEIAFYQRPLKDFSHLVGSCTFYENEKRACKNSYSAWEFIALGKIINTLESIKKDTGEIFSNEIITQILKEVLDKGSLSYTKLRKMINLDEKVKFKGLKYDKEGVEKTNLIEFKKLKEFKKALGEHNLERKTLDEIATHITLTKDENQLKKQLEQYALSQNQIDALAELDFNDHINLSFKALYEILPLMEKGKRYDEACNELGLKAKTSNQKSEFLPAFCDSIFAQELTNPIVNRAISEYRKVLNRLLKKYGKMHKIHIELARDAGLSKEARNKIEKEQKENKDINDKAEKTCKEFGLKPNAKNILKIKLWREQGEICAYSGKKITIDDLKEDKALEVDHIYPYSRSYDDSYNNKVLVFIKENQLKLNQTPYEAFGSNQEKWSKIQVLAQKLPYKKKNRILDENFKNKDQIEFISRNLNDTRYATSLIAKYTKEYLEFLPLSDDEDISLKSGEKGSKTHVQTMNGMLTSVLRHAWGFSQKDRNNHLHHALDAIIIAYSTNSIIKAFSDFKKNQEILKAKLYAKKLTSEEYKNQSKFTGFEKYRSKILEKLDSIFVSKPPNKNTKGALHEQTFYSYQDILEEYKTQEGLKRALECGKVRKIGTKYVVNDRMVRLDIFKKDNKFYGIPIYTMDFALGVLPNKVVTIGTDKDKIKKEWKTIDETYEFCFSLYKGDLVLIQKKEMQESEFAYYNGFDISSASISLEKHDNKFENLTENQKLLFPKAKEGDVEVRGIGIQGLKVFKKYMVTPLGEIQETRTEARQNIQPRKKHGLR

SEQ ID NO: 107 - protein, 1397 aa, gamma proteobacterium
MTKNYISPIAIDLGAKFTGVALYQYLEGADCTQEVAKGLLVDDRGNVTWSQEGRRGKRHQVRGYKRRKMAKRLLWLILDSEYGIKREEVTEPLLKFINGLLNRRGYTYISEEVDEESMNVSPLPFSEMMPDYFNSSAPLLEQLAKLLSDKNKLVRFRAEGKIPSNKNEFKKLLDTALDGKYKDEKKELSEAWGNILIASENVLKSTVDGHKSRSEYLANIKEDIKSNEELEKQISSKEIDGFYNLVGHLSNFQLRLLRKYFNDPNMSGVSYWDEKRLEKYFYQWVQGWHTKGGTDEAEKKNIILKTKGAPLLKTLKSLSADLTIPPYEDQNNRRPPKCQSVLLSDEKLTMHYPKWKEWVGQLVKQNDNAYLNENVTLANALHRIVERSRSIDPYQLRLLISITDAEKRNDLAGYKRLKLSLGSEVDEFLLLVKNIVDETKEAREGLWFETENKLFFKCGKTPPRKEKLKSTLLSAVLGKNLSDDEQSSFIEEFWKSGTPKIERRNVRGWCRLASQVQKTYGVYLKEYGLQQLHKLEAGKKLDDKPLALLYKNSGLIASKIGEALNIEPDEVSRFASPHSLAQIFNIIEGDVAGFNKTCRACTYENIWRMQEEKVESLLTNQLLSEIHGERKVPLKSAMCTRLSADSTRPFDGQMASIIEHIARKIAQHKIAQINDVPKEFSIDIPIIIESNQFSFTAELEEIKRGRGSAKAKKAKELGEKSKAGWVSKTERIKTSSEGICPYTGAPLGGSGEIDHIIPRSLTGRTKKTVFNSEANLIYCSSKGNHDKGNRVYVIEQLNDKYLKKQFSTSDVNLIKKKIKTTIQRFTEGGEKLRSFSELSREDQKAFRHALFVPELKSEVTSLLAVKNITRVNGTQAWLAKKIASLLAEHLDKQGRDYTLSAHQIDPWSVSKQRKMLASAEPIWAKKDPQPAASHVVDAVCTFLEALEQPHTASRLKTISSTSFEKTGWRSALIPDLIKVDALDRRPKYRRYNIGSTSLFKDGIYAERFLPILIDENGLMAGYDIDNSLKAKGADVVFESLSPFLLFKGEEVGAQSLSDWQERIDGRYLYMSIDKVKAFDYLQEKVGEKDIAAELLNSIHFTQRKTELRAKFSDDSGKKMKTLDAIRKSLKLTVTVNEIGKRKEKCGFSGTIGIPAKSAWENLLDEPLLETYWGTKMPPQEIWEKVYRKHFPRNIPNQAHRKVRKDFSLPVVDSVSGGFRVKRKTPNGYNYQLLAIDGYSAVGFKKEGDNVDFKSPALVPQIAESKSVTPISSELVHLDKNEIVYFDEWRKIDISDSDLKQFVSSLELAPGSQNRFYIRFTVDEDQFERHFKSALRVNGIQDLDTVNKTFDWNREIPSLLIPPRSNLFLLETGQKITFEYIANGANAEVKKAYSLRRA

SEQ ID NO: 108 - protein, 1082 aa, Neisseria meningitidis
MAAFKPNPINYILGLDIGIASVGWAMVEIDEEENPIRLIDLGVRVFERAEVPKTGDSLAMVRRLARSVRRLTRRRAHRLLRARRLLKREGVLQAADFDENGLIKSLPNTPWQLRAAALDRKLTPLEWSAVLLHLIKHRGYLSQRKNEGETADKELGALLKGVADNAHALQTGDFRTPAELALNKFEKESGHIRNQRGDYSHTFSRKDLQAELILLFEKQKEFGNPHISGGLKEGIETLLMTQRPALSGDAVQKMLGHCTFEPAEPKAAKNTYTAERFIWLTKLNNLRILEQGSERPLTDTERATLMDEPYRKSKLTYAQARKLLGLEDTAFFKGLRYGKDNAEASTLMEMKAYHAISRALEKEGLKDKKSPLNLSPELQDEIGTAFSLFKTDEDITGRLKDRIQPEILEALLKHISFDKFVQISLKALRRIVPLMEQGKRYDEACAEIYGDHYGKKNTEEKIYLPPIPADEIRNPVVLRALSQARKVINGVVRRYGSPARIHIETAREVGKSFKDRKEIEKRQEENRKDREKAAAKFREYFPNFVGEPKSKDILKLRLYEQQHGKCLYSGKEINLGRLNEKGYVEIDHALPFSRTWDDSFNNKVLVLGSENQNKGNQTPYEYFNGKDNSREWQEFKARVETSRFPRSKKQRILLQKFDEDGFKERNLNDTRYVNRFLCQFVADRMRLTGKGKKRVFASNGQITNLLRGFWGLRKVRAENDRHHALDAVVVACSTVAMQQKITRFVRYKEMNAFDGKTIDKETGEVLHQKTHFPQPWEFFAQEVMIRVFGKPDGKPEFEEADTPEKLRTLLAEKLSSRPEAVHEYVTPLFVSRAPNRKMSGQGHMETVKSAKRLDEGVSVLRVPLTQLKLKDLEKMVNREREPKLYEALKARLEAHKDDPAKAFAEPFYKYDKAGNRTQQVKAVRVEQVQKTGVWVRNHNGIADNATMVRVDVFEKGDKYYLVPIYSWQVAKGILPDRAVVQGKDEEDWQLIDDSFNFKFSLHPNDLVEVITKKARMFGYFASCHRGTGNINIRIHDLDHKIGKNGILEGIGVKTALSFQKYQIDELGKEIRPCRLKKRPPVR

SEQ ID NO: 109 - protein, 1334 aa, Listeria monocytogenes
MKKPYTIGLDIGTNSVGWAVLTDQYDLVKRKMKISGDSEKKQIKKNFWGVRLFEKGETAAKRRMSRTARRRIERRRNRISYLQEIFAIQMNEVDDNFFNRLKESFYAESDKKYNRHPFFGTVEEEVAYYKDFPTIYHLRKELIDSQKKADLRLVYLALAHIIKYRGHFLIEGALDTKNTSIDEMFKQFLQIYNQVFANDIEEASLKKTEKNQEVAQILAEKFTRKDKLDKILSLYPGEKTTGVFAQFVNIIVGSTGKFKKHFNLHEKKDINCAEDTYDTDLESLLAIIGDEFAEVFVAAKNAYNAVVLSNIITVTDSTTRAKLSASLIERFENHKEDLKKMKRFVRTYLPEKYDEIFDDTEKHGYAGYISGKTKQADFYKYMKATLEKIEGADYFIAKIEEENFLRKQRTFDNGVIPHQLHLEELEAILHQQAKYYPFLREDYEKIKSLVTFRIPYFVGPLAKGQSEFAWLTRKADGEIRPWNIEEKVDFGKSAVDFIEKMTNKDTYLPKENVLPKHSLCYQKYMVYNELTKVRYIDDQGKTNYFSGQEKQQIFNDLFKQKRKVKKKDLELFLRNINQIESPTIEGLEDSFNASYATYHDLLKVGMKQEILDNPLNTEMLEDIVKILTVFEDKRMIKEQLQQFSDVLDGTVLKKLERRHYTGWGRLSAKLLVGIRDKQSHLTILDYLMNDDGLNRNLMQLINDSNLSFKSIIEKEQVSTTDKDLQSIVAELAGSPAIKKGILQSLKIVDELVSVMGYPPQTIVVEMARENQTTNKGKNNSKPRYKSLEKAIKEFGSQILKEHPTDNQELKNNRLYLYYLQNGKDMYTGQELDIHNLSNYDIDHIVPQSFITDNSVDNLVLTSSAGNREKGDNVPPLEIVQKRKIFWEKLYQGNLMSKRKFDYLTKAERGGLTEADKARFIHRQLVETRQITKNVANILHQRFNYKTDGNKDTMETVRIVTLKSALVSQFRKQFQFYKVREVNDYHHAHDAYLNGVVANTLLKVYPQLEPEFVYGEYHQFGWFKANKATAKKQFYTNIMLFFAQKDRIIDENGEILWDKRYLETVKKVLGYRQMNIVKKTEIQKGEFSNVTPNPKGKSNKLIPRKKDWDPIKYGGFDGSKMAYAIIIEYEKQKRKVRIEKKLIQINIMEREAFEKDEKTFLEEKGYHQPKVLIKVPKYTLYECKNGRRRMLGSANEAHKGNQMLLPNHLMALLYHAEKYEAIDGESLAYIEVHRALFDELLAYISEFARKYTLSNDRLDEINMLYERNKDGDVKSIAESFVSLKKFNAFGVHQDFSFFGTKIERKRDRKLNELLNSTIIYQSITGLYESRKRLDN

SEQ ID NO: 110 - protein, 1337 aa, Enterococcus faecalis
MKKDYVIGLDIGTNSVGWAVMTEDYQLVKKKMPIYGNTEKKKIKKNFWGVRLFEEGHTAEDRRLKRTARRRISRRRNRLRYLQAFFEEAMTALDENFFARLQESFLVPEDKKWHRHPIFAKLEDEVAYHETYPTIYHLRKKLADSSEQADLRLIYLALAHIVKYRGHFLIEGKLSTENISVKEQFQQFMIIYNQTFVNGESRLVSAPLPESVLIEEELTEKASRTKKSEKVLQQFPQEKANGLFGQFLKLMVGNKADFKKVFGLEEEAKITYASESYEEDLEGILAKVGDEYSDVFLAAKNVYDAVELSTILADSDKKSHAKLSSSMIVRFTEHQEDLKKFKRFIRENCPDEYDNLFKNEQKDGYAGYIAHAGKVSQLKFYQYVKKIIQDIAGAEYFLEKIAQENFLRKQRTFDNGVIPHQIHLAELQAIIHRQAAYYPFLKENQEKIEQLVTFRIPYYIGPLSKGDASTFAWLKRQSEEPIRPWNLQETVDLDQSATAFIERMTNFDTYLSSEKVLPKHSLLYEKFMVFNELTKISYTDDRGIKANFSGKEKEKIFDYLFKTRRKVKKKDIIQFYRNEYNTEIVTLSGLEEDQFNASFSTYQDLLKCGLTRAELDHPDNAEKLEDIIKILTIFEDRQRIRTQLSTFKGQFSAEVLKKLERKHYTGWGRLSKKLINGIYDKESGKTILGYLIKDDGVSKHYNRNFMQLINDSQLSFKNAIQKAQSSEHEETLSETVNELAGSPAIKKGIYQSLKIVDELVAIMGYAPKRIVVEMARENQTTSTGKRRSIQRLKIVEKAMAEIGSNLLKEQPTTNEQLRDTRLFLYYMQNGKDMYTGDELSLHRLSHYDIDHIIPQSFMKDDSLDNLVLVGSTENRGKSDDVPSKEVVKDMKAYWEKLYAAGLISQRKFQRLTKGEQGGLTLEDKAHFIQRQLVETRQITKNVAGILDQRYNANSKEKKVQIITLKASLTSQFRSIFGLYKVREVNDYHHGQDAYLNCVVATTLLKVYPNLAPEFVYGEYPKFQAFKENKATAKAIIYTNLLRFFTEDEPRFTKDGEILWSNSYLKTIKKELNYHQMNIVKKVEVQKGGFSKESIKPKGPSNKLIPVKNGLDPQKYGGFDSPVVAYTVLFTHEKGKKPLIKQEILGITIMEKTRFEQNPILFLEEKGFLRPRVLMKLPKYTLYEFPEGRRRLLASAKEAQKGNQMVLPEHLLTLLYHAKQCLLPNQSESLAYVEQHQPEFQEILERVVDFAEVHTLAKSKVQQIVKLFEANQTADVKEIAASFIQLMQFNAMGAPSTFKFFQKDIERARYTSIKEIFDATIIYQSTTGLYETRRKVVD

SEQ ID NO: 111 - protein, 1426 aa, Capnocytophaga ochracea
MKNILGLDLGTTSIGFAHIVEDENKEKSEIKELGVRIVSLTTDEQSDFEKGKSITTNANRTLKHGARLNLDRYQQRRKYLIDLLQKANLITPSSILAENGKNTTHSTWQLRAKAVTERIEKEEFARILLAINKKRGYKSSRKAKTEDEGQAIDGMAIAKRLYDENLTPGQLSLQLLQQNKKLLPDFYRSDLQKEFDLVWNFQKQFYPDILTDIFYKELQGKGKDATSKAFSKRYHFDTTENKGSKESVRLQAYQWRAEAISKQLSKEEVAYVLTEINNNLNNASGYLGAISDRSKELYFNRQTVGQYLYAKLQENRHNSLKNKVFYRQDYLDEFERIWETQASFHKELTDELKKQIRDVVIFYQRKPKSQKGLISFCEFESKEIEIEKDGKTITKNIGARVVPKSSPLFQEFKIWQILNNVICKRKGIRKKKISAKTTQLDLLNESSQTIFSLDMECKQLLFDELNLKGDLKSDKVLKLLGYSPQEWEINYNQLEGNRTQKALYEAYLKIVEMEAHDVKDILQIKSAKDDWSLDESPLSASEIREKVKAIFQTLGICTKILYFDPLLPVKEFEEQDSYQLWHLLYSYESDDSTSGNETLYRILEKKYAFKREHARILANVALQDDYGSLSTKAIRKIYPNIKENQYSTACEKAGYKHSKLSLTTEELEARELKNIIPLLKKNALRNPVVEKILNQMINVVNALIEKNSERDAEGKITKYFHFDEIRIELARELKKNAQKRYEMTQNINKAKLEHQKISEILQKEFGIKNPTKSDIIRYRLYQELEHNGYKELYTNAPIARDMLFSKNIEIEHIVPKARVFDDSFSNKTLTFHRINSDKGEYTAFDYITSLNSEEELNQYLTRVENAYKTKSISPTKYKNLLKKASEIGDDFINRDLRDTQYIAKKAKEILFQVTKNVLSTSGSITDRLREDWGLVDVMKELNMPKYQSLGLTEVEERKDGNKVTVIKNWTKRNDHRHHAMDALTVAFTKPSYIQYLNHLNARKDENNKNYSVILAIEEKETIKVPTNNGKNKRVFIEPIPNFRQVAKKHLEEIFISHKAKNKVVTKNTNKPAGTDKQQITLTPRGQLHKETIYGKYQYYINKEEKIGVKFDERTIAKVSNPVYREALLKRLQANDNDPKKAFAGKNALSKNPIYLDESKTKTLPEKVNLTYLEEDFSIRKDISPDNFKDLKSIEKVIDQGVKRILIKRLQAYDNDPKKAFVDLEKNPIWLNKEKGIAIKRVTISGVNNAQPLHIGKDHLGKTTLNKEGKEIPVDYVSTGNNHHVAIYRDKEGNLQEQIVSFFDAVVRAQQGIPIIDKTYKQAEGWQFLFTMKQNEMFVFPNATTGFNPAEIDLLDPKNKKLISPNLFRVQKIATKDYFFRHHLETNVETDNILKNVTWKREGLSGLKDIVKVRINHLGDIVSIGEY

SEQ ID NO: 112 - protein, 1424 aa, Parabacteroides sp.
MKRILGLDLGTNSIGWALVNEAETDEEVSSIIRLGVRVNPLTVDETQNFEKGKSITTNAERTLKRSMRRNLQRYKLRRDALVEFLKELGFITDETILSEQGNRTTFETCRLRAKAAEEEISLEELSRVLLMINKKRGYKSSRKVKKEEDGVLIDGMEIAKKLYEEDLTPGQLCSQLLESGKKVLPDFYRSDLQEELDRIWSVQKQFHPDVFCDAAKEEIKGKNRSQTWAILANYFVWKEEVVGWNDREAKNETIEKECKLVGLKRTTKGYELKKENYRWRAQALTEQLGLEEIAVVLQEINGQINASSGYLGAISDRSKVLYFNHQTVGQYQMAELDKNPHASLRNMVFYRQDYLDEFDRIWEKQAEFHKELTAELKKEIRDMIIFYQRRLKSQKGLISFCEFERLEIVVEKDGKKQTKVIGCKVIPRSHPLFQEFKVWQTLNDIKVLGREKKRNALSASESRALYPEEKEILARELAIKENMKKADVLKLLFENPQELDLNFKQIDGNRTGFSLFSAYSKMIEKYGYEPLDFKKPADEIIGQLRTIFTDLGWNTNLFTIDLTKEGKELEMQPYFRLWHLLYSFEGDNTSTGNGKLIEKIMQLCGVEKEYAVELASLSFQDDYGSLSAKAIKRILPYLKEGNLYDVACEYAGYRHSKSSLTKEEIENKVLKGKLEVLPKNSLRNPVVEKILSQMVNVINTIIDTYGKPDEIRVELARELKKSAKEREELTKAIAKSTREHEEIRKLLQDEFGMMNVSRNDIIRYKLYEELKDNGYKTLYSNQYIPKEKIFSKEIDIEHIIPQSRLFDDSLSNKTLEYKAINIEKGNKTAYDFVKEKYGEEGLQQYINRCESLFNDKKAKLRKLKMEQKDIPDGFIDRDLRNTQYIAKKALAMLNEICRRVVATTGSITDQLREDWQLVDVMKELNLPKYEALGFVETYEDKDGRKIKRIKDWTKRNDHRHHAMDALTVAFTKDAFIQYFNNKNAAQDSGNRNHTNIIGIKTRYFDKGRALPPIPLEQFRIEAKQHLEKLLVSIKAKNKVVTVNVNRTKKRKGENTKIQQTPRGQLHLETVYGSHKQYVTKIEKVNASFDAAKIATVSKRAYRNALLKRLETFGNDPKKAFTGKNALEKNPLYADKYQTIRVPEKVQTVEFETIYTIRKPVDPALNVDKVVDVKVRAILERRLKEYGGDPKKAFVNFWENPIWLNKEKGISIKRVSIRGINNAQSIHVKKDKNGNPIWDENGKQIPVDFVNTGNNHHVAIYRKPVLDKKGQVTFDEDGNLMYELDEVVVPFFEAVTRANLGLPIIDKDYRKSEGWQFLFSMKQNEYFVFPNEKTGFNPKEVDLLNPDNYAMISPNLFRVQTMSKVMYGNNVVRDYKFRHHLETTVKDMKELKDIAYKQYKTLSFGNSVVKIRINHIGQIVSVGEY

SEQ ID NO: 113 - protein, 1395 aa, Lactobacillus jensenii
MKEIKDYIIGLDIGTNSCGYVVTDKQNNILKLKGKTAIGARLFKEGQAAADRRSFRTTRRRLARRHWRLGLLEEIFDPEMEKIDPNFFRRLKESDYSPKDSRKQFNAIVFKSIKADKRFYKKYPTIYHLRNALMHDNQKHDLREIFMAVHHIVKYRGNFLREDSVNAFKAAKFSLRGEDGIGPVDKLNDLLKEIYSEYSPELATNNLSKIEDIIKDKNLYKQDKLKQVATLLIKEADSKDKAKLNKDIAKQVANSFMGYMFRLDTLFSLTDVDVKDYKLKFSDANIDESLDDLTSLLTDAQIEFVLELQSIYNTIVLNEIVPDGMSLSESMIKKYDDHKEDLKIFKEYIDSLSDQKKAKKLLSAYNLYVNYRKSDLVEAKNLFKNKKVGDKNFADVISNFEVFGKFVSDNLDDSELANKIKARLDLGEFLPKQRTNQNGVIPYQLHQVELTQILEKQGKYYPFLITPNPVESHRNNAPYEISELVSFRVPYYVGPLIDNQSIKDKQNKNKFAWMVRQKQGQITPWNLEEMVDTTESANQFIKRMTRKDTYLLAEDVLPKSSLVYQKFMILDELNRIKIDGKKLTSELKHDIFEKLFKKQKSINLDNLKNYLLVEGNIPGLIEGLSDGINFNNSFSTYIDYRNIFGDEIDNPNKQADFEKMIEWSTVFEDRKIFKRKLKEITWLTSEQIKQVSSKRYSGWGRLSKKLLTQITDENGVNILQRLWNEPETLTEVLANPVIKRKIVEANSSFTKAKDMKDILVEAYTSPQNKKAIRQVMRVVDDIIAAAHGKKPSQIAIEFAREDQDNPQMTKSRKAQLDQIYAKISDEFLDDAVKNELKNMKDNKPLAKDKVFLYFKQMGRDAYSGEKLSLDNLQDYDIDHIYPQSFIKDDSFDNRVLVQRAYNNGKSDNVPVLLFGNKIAAGLGITIRQMWKKWLELGLISKRKFNNLITDPEKISRNMASGFVNRQLVETSQVIKLVANILQAKLPDTEIIEVKASYNSILRKEFNLYKSREVNDYHHAIDAYLTTIVGNYLYQVYPKLRPYFVYGQFKKFGKAENQEDDPVKKIKKFNFIYQLIWGKDDAICISHTNQQVFSKKDIIDKLTTAYNFKYMNISHAVYTRNNNMFKQTLFPIIERTTAKTKSLIPKKLDRPTDIYGGYSNNNDAYLALVKVDKKRGSEYRVVGIPMRAAAMLKASKNYDEDLRKVIEPMVMFDKNGKAKRGIEGFRVLVGKMPFKQAVLDGNKKFMLTGTVDTPNLKQLVLSQQNMKYILDYIEDVDCRKHKFGDKVQNPDKCLLEVFDEIIEIVDKYFELFDSRDFREKLRNSRNKFIKLEASKKADTILAILKGLQAKSTRATIKELNISDFGRIITSSISPEAQLIYQSPTGLFERRVKVKDL

SEQ ID NO: 114 - protein, 1140 aa, Roseburia intestinalis
MRENGSDERRRNMDEKMDYRIGLDIGIASVGWAVLQNNSDDEPVRIVDLGVRIFDTAEIPKTGESLAGPRRAARTTRRRLRRRKHRLDRIKWLFENQGLINIDDFLKRYNMAGLPDVYQLRYEALDRKLTDEELAQVLLHIAKHRGFRSTRKAETAAKENGAVLKATDENQKRMQEKGYRTVGEMIYLDEAFRTGCSWSEKGYILTPRNKAENYQHTMLRAMLVEEVKEIFSSQRRLGNEKATEELEEKYLEIMTSQRSFDLGPGMQPDGKPSPYAMEGFSDRVGKCTFLGDQGELRGAKGTYTAEYFVALQKINHTKLVNQDGETRNFTEEERRALTLLLFTQKEVKYAAVRKKLGLPEDILFYNLNYKKAATKEEQQKENQNTEKAKFIGMPYYHDYKKCLEERVKYLTENEVRDLFDEIGMILTCYKNDDSRTERLAKLGLVPIEMEGLLAYTPTKFQHLSMKAMRNIIPFLEKGMTYDKACEEAGYDFKADSKGTKQKLLTGENVNQTINEITNPVVKRSVSQTVKVINAIIRTYGSPQAINIELAREMSKTFEERRKIKGDMEKRQKNNEDVKKQIQELGKLSPTGQDILKYRLWQEQQGICMYSGKTIPLEELFKPGYDIDHILPYSITFDDSFRNKVLVTSQENRQKGNRTPYEYMGNDEQRWNEFETRVKTTIRDYKKQQKLLKKHFSEEERSEFKERNLTDTKYITTVIYNMIRQNLEMAPLNRPEKKKQVRAVNGAITAYLRKRWGLPQKNRETDTHHAMDAVVIACCTDGMIQKISRYTKVRERCYSKGTEFVDAETGEIFRPEDYSRAEWDEIFGVHIPKPWETFRAELDVRMGDDPKGFLDTHSDVALELDYPEYIYENLRPIFVSRMPNHKVTGAAHADTIRSPRHFKDEGIVLTKTALTDLKLDKDGEIDGYYNPQSDLLLYEALKKQLLLYGNDAKKAFAQDFHKPKADGTEGPVVRKVKIQKKQTMGVFVDSGNGIAENGGMVRIDVFRVNGKYYFVPVYTADVVKKVLPNRASTAHKPYGEWKVMEDKDFLFSLYSRDLIHIKSKKDIPIKMVNGGMEGIKETYAYYIGADISAANIQGIAHDSRYKFRGLGIQSLDVLEKCQIDVLGHVSVVRSEKRMGFS

SEQ ID NO: 115 - protein, 992 aa, Treponema vincentii
MQKNSGEDENCGFEFLTEEEKELIKPLFFRISKPSFQFADIEKKLKGKNGFWKFNYRKDTNVSGCPVSAGLKNIFGDEASAESWKDKKVGQYDMCDIWHVLFDFDDEEKLLEFAKRKLFLSDEAAKKFCAIRIQQGYANLSLKAIRKITPFLRKGYIYSTAVFLANIPFMIGRDIFLQNEKEIEDSVKNIIGTLRDKNNIIVLANRCIESAFKDKDNDFRFEEWDKALVENSAWDLFGKKKWNEYDEEKRKTIISQVSEKVEDNLKIAVGKNPNDYKYPLLRTDDLIMDYLNQKGFVVKGELYHPSDTDYNFETPVPAEDGKIYLASPRSPSVKNPVVMRALHQLRKLVNYLIKTGKIDSTTKINVELANDVNDKNQRKAIEELAKTNEKNNADARKKIEELCNEAGFKVVPTESDIKKFRLWKEQNETCPYTGKHISFTDLFGPIPKFDFEHTIPRSLSYDDSLENLTLCDSEFNRNIKKQRLPSELPDFEEINKRFLKFYEDKIDNCLRIIELNSKSGGSYEEPAVKDLRIVKKHKAQYELNYYKEKLRRFSSTEITSGFKHSQLNDTRIITKFSLSYLKGVFDHVQPVKGSMTDTFKRQWGLMERNEIKDRSNHTHHTVDALTVACINRGKFNLLSEAIKNSSDGKHLKFPKPWETFDTDVLNAVRYIIPKYFSDESSLRQSKKILRGRDGKPVLKNGKAVFIQGATARGSLHKDTFYGCIKTVPEKGGKSEMIFVQRIPVSTLDEKVAEKIIDKRIRKTFEKNLSTGIQTLQEIQTDGILLPFKKEGRDVFVKRVRIKAHPTSPIILKKHHNVINKNPKDYKQNYYVENEENYLLAIYRGKDAKGKDVSDHKLCNLLNAVKSRQNKTGFYPDFKEKKGINLQLYKVLKIGKIVILQNDIQEDVFALPKEKLWKRMYRIAGLATSRNDIQIKLVHIIRETPWGYMKGEKDLNAGKECLLYGTANFKGLVEGQDFTVSPAGEIIQKARVC

SEQ ID NO: 116 - protein, 1340 aa, Enterococcus faecium
MKKEYTIGLDIGTNSVGWSVLTDDYRLVSKKMKVAGNTEKSSTKKNFWGVRLFDEGQTAEARRSKRTARRRLARRRQRILELQKIFAPEILKIDEHFFARLNESFLVPDEKKQSRHPVFATIKQEKSYHQTYPTIYHLRQALADSSEKADIRLVYLAMAHLLKYRGHFLIEGELNTENSSVTETFRQFLSTYNQQFSEAGDKQTEKLDEAVDCSFVFTEKMSKTKKAETLLKYFPHEKSNGYLSQFIKLMVGNQGNFKNVFGLEEEAKLQFSKETYEEDLEELLEKIGDDYIDLFVQAKNVYDAVLLSEILSDSTKNTRAKLSAGMIRRYDAHKEDLVLLKRFVKENLPKKYRAFFGDNSVNGYAGYIEGHATQEAFYKFVKKELTGIRGSEVFLTKIEQENFLRKQRTFDNGVIPHQIHLSELRAIIANQKKHYPFLKEEQEKLESLLTFKIPYYVGPLAKKQENSPFAWLIRKSEEKIKPWNLPEIVDMEGSAVRFIERMINTDMYMPHNKVLPKNSLLYQKFSIYNELTKVRYQDERGQMNYFSSIEKKEIFHELFEKNRKVTKKDLQEFLYLKYDIKHAELSGIEKAFNASYTTYHDFLTMSENKREMKQWLEDPELASMFEEIIKTLTVFEDREMIKTRLSHHEATLGKHIIKKLTKKHYTGWGRLSKELIQGIRDKQSNKTILDYLINDDDFPHHRNRNFMQLINDDSLSFKKEIKKAQMITDTENLEEIVKELTGSPAIKKGILQSLKIVDEIVGIMGYEPANIVVEMARENQTTGRGLKSSRPRLKALEESLKDFGSQLLKEYPTDNSSLQKDRLYLYYLQNGRDMYTGAPLDIHRLSDYDIDHIIPRSFTTDNSIDNKVLVSSKENRLKKDDVPSEKVVKKMRSFWYDLYSSKLISKRKLDNLTKIKLTEEDKAGFIKRQLVETRQITKHVAGILHHRFNKAEDTNDPIRKVRIITLKSALVSQFRNRFGIYKVREINEYHHAHDAYLNGVVALALLKKYPQLAPEFVYGEYLKFNAHKANKATVKKEFYSNIMKFFESDTPVCDENGEIFWDKSKSIAQVKKVINHHHMNIVKKTEIQKGGFSKETVEPKKDSSKLLPRKNNWDPAKYGGLGSPNVAYTVAFTYEKGKARKRTNALEGITIMEREAFEQSPVLFLKNKGYEQAEIEMKLPKYALFELENGRKRMVASNKEAQKANSFLLPEHLVTLLYHAKQYDEISHKESFDYVNEHHKEFSEVFARVLEFAGKYTLAEKNIEKLEKIYKENQTDDLAKLASSFVNLMQFNAMGAPADFKFFDVTIPRKRYTSLTEIWQSTIIHQSITGLYETRIRMGK

SEQ ID NO: 117 - protein, 1363 aa, Lactobacillus rhamnosus
MTKLNQPYGIGLDIGSNSIGFAVVDANSHLLRLKGETAIGARLFREGQSAADRRGSRTTRRRLSRTRWRLSFLRDFFAPHITKIDPDFFLRQKYSEISPKDKDRFKYEKRLFNDRTDAEFYEDYPSMYHLRLHLMTHTHKADPREIFLAIHHILKSRGHFLTPGAAKDFNTDKVDLEDIFPALTEAYAQVYPDLELTFDLAKADDFKAKLLDEQATPSDTQKALVNLLLSSDGEKEIVKKRKQVLTEFAKAITGLKTKFNLALGTEVDEADASNWQFSMGQLDDKWSNIETSMTDQGTEIFEQIQELYRARLLNGIVPAGMSLSQAKVADYGQHKEDLELFKTYLKKLNDHELAKTIRGLYDRYINGDDAKPFLREDFVKALTKEVTAHPNEVSEQLLNRMGQANFMLKQRTKANGAIPIQLQQRELDQIIANQSKYYDWLAAPNPVEAHRWKMPYQLDELLNFHIPYYVGPLITPKQQAESGENVFAWMVRKDPSGNITPYNFDEKVDREASANTFIQRMKTTDTYLIGEDVLPKQSLLYQKYEVLNELNNVRINNECLGTDQKQRLIREVFERHSSVTIKQVADNLVAHGDFARRPEIRGLADEKRFLSSLSTYHQLKEILHEAIDDPTKLLDIENIITWSTVFEDHTIFETKLAEIEWLDPKKINELSGIRYRGWGQFSRKLLDGLKLGNGHTVIQELMLSNHNLMQILADETLKETMTELNQDKLKTDDIEDVINDAYTSPSNKKALRQVLRVVEDIKHAANGQDPSWLFIETADGTGTAGKRTQSRQKQIQTVYANAAQELIDSAVRGELEDKIADKASFTDRLVLYFMQGGRDIYTGAPLNIDQLSHYDIDHILPQSLIKDDSLDNRVLVNATINREKNNVFASTLFAGKMKATWRKWHEAGLISGRKLRNLMLRPDEIDKFAKGFVARQLVETRQIIKLTEQIAAAQYPNTKIIAVKAGLSHQLREELDFPKNRDVNHYHHAFDAFLAARIGTYLLKRYPKLAPFFTYGEFAKVDVKKFREFNFIGALTHAKKNIIAKDTGEIVWDKERDIRELDRIYNFKRMLITHEVYFETADLFKQTIYAAKDSKERGGSKQLIPKKQGYPTQVYGGYTQESGSYNALVRVAEADTTAYQVIKISAQNASKIASANLKSREKGKQLLNEIVVKQLAKRRKNWKPSANSFKIVIPRFGMGTLFQNAKYGLFMVNSDTYYRNYQELWLSRENQKLLKKLFSIKYEKTQMNHDALQVYKAIIDQVEKFFKLYDINQFRAKLSDAIERFEKLPINTDGNKIGKTETLRQILIGLQANGTRSNVKNLGIKTDLGLLQVGSGIKLDKDTQIVYQSPSGLFKRRIPLADL

SEQ ID NO: 118 - protein, 1234 aa, Prevotella tannerae
MPNFWSIFTENLQTYLMKTRILGLDTGTNSLGWAVVDRDENNQYTPICRGDLIFTEGVKQEKGIEFSLAAERTSYRASRRHYFRRRLRKVEVLKVLVKHKLCPPLSDEALNRWHTKKEYPLDEDFILWQRTNEADNKNPYHDRHICLHRKLNLKDSQTDRYTLGRALYHLTQRRGFLSNRLDQNEEAEETGKVKSAISELSKEMKEAGCEFLGDYFYLLYRTEGNRVRIRSRYTDREKHYLQEFKEICRVQELDEDLAKALEKTIFFQRPLKSQRQGVGKCTMEKGHSRCAVSHPLYEEYRLLCYLNNIRIKTPSDDRLRPLNAEEREKITPLFYKEKNFDFEKIAKKLAGKTPFGWIRDAEDWPYQFNYRMTQEAPACPTTAQLIKVFGEDWKAALAETYTMSAKQDGTLKTEDEICTDIWNVLYSFSSKEKLKEFGLKKLQLDEVQAKAFSEIRLTRDFASLSLKAIRKILFFLRTGEDYSKAIFLANIPTIVGEEIWNDIERRSRLLYKVDLALRPQEERDAEEHRTIAERIKAAVAAEVPDAPIDLLYHPSMIEAYPDAKRNERFDCYQLGSPKTNAVRNPMAMRSLHMVRKVINHLLRKHIIDEKTEIHIEYARELNDANKRQAIADWQRELSKRHTAYAQNIRQLYKAETGLVIEPTKADILKYQLWEEQQHVCLYTGKKIGIADFLGANPKFDIEHTIPRSRGGDSTQENLTLCESKFNRDIKRDKLPTELANYEEILARIEHWKKQCYALKLKRDGIRTHSGLEKSIKDSRIRRRHLVGLEYGYLKGKYDRFTMKEVPEGFSRRQGAGIGLISKYAGLFLKSLFKDPKNPNRSNVYVVKGAITAEFRKLWGLQQADEAKSRENHTHHCIDAYTIACIGPCEYAALAAYYRSDEEFKYGRRREKPQFEKPWPTFTEDLLKLQEELLIVHQTTDKLGKRDRRKVKTPRGKFLTGGDSARGRLHQETYYGAINYDGNIKYVVRKPLDSLTEKDLDKIVDETVMGIVKGAVEAKGSLKEALADGIYMNKEKGILIKRVRIFSDVSEPINLKQLRDVSTKEYKRHIHLRKDENYLFAIYEGIDKKKNKKQTETATVDYLDAAKFYKDSKRRDKANSLVGDYSKKNKLPLKCILKKRQMVLFYEHSPEEIRFKDKKDLSRRLYIVTSIAKDGRVKFLHHQAATATGIQSSPSPFTNDGEHQPYYRLSASNIKVLVAGIDFDINILGEITPKL

SEQ ID NO: 119 - protein, 1496 aa, Prevotella veroralis
MKTILGLDLGTNSIGWAKVCVDDNGNYLRDIKLGSRIIPMSQDVLGNFDKGVTESQTSVRTGFRGVRRIRERSLLRRERLHRVLHVLGYLPPHYDSAIGWNKNEPSTYGKFLNHGEPKLAWEHKEDGSMRFLFMESFHEMMADFAKSQPSLVSDGKKIPLDWTIYYLRKKALSQPIRKEELAWLLLNFNQKRGYYQLRGEEDDDNPTKCEEYYELKVVGIEADEEGKNGNTWYNVKLENGWIYRRQSKIPLDDWIGKVREFIVTTEYEKDGITLKKDKNGDVKRSFRSPSEDDWGLRKKRTEKLLDSSKMTVGAFVYDHLLAEPSDKIRGKFIRTIERKYYKKELYAILCEQSKYHEELRSGDYLNKCAEELYKNNQPHRNSLLTKDLAYLLLEDLIFYQRPLKTKKSLIAECPYEAYKYVDKETGEIKRQGIKCIAKSNPYYQEFRLWQFISNLRLFNKADDKEVTADYLPTQDDYVRLFAYLNDRKEINQETLLKEFFKLKKITVNSEKVFPIRWNYIEDKEKKYPCNETRHELLLALDRARIDHSWLEKPGQEYRLWHLLYSVESKEETKEALRKLKDDDAFVESFLKVKPFKREYGAYSEKAIKKLLAVMRMGSLWRETDICDTTKGNITKILQGEIDEKLKEKISASVSSYNQLSDFQGLPVWLACYVVYGRHSEAAEIQHWKTPESLLAYINGFKQHSLRNPIVEQCILETLRTVHDIWKEVGHIDEIHVELGRNMKSTADQRARISENVLRNENTNLRIKSLLLELKNDPNIKDVRPYSPMQQEKLRIYEEGVLQELTKDDKDFTEITKISTMAQPSAKELQRYKLWLEQKYRSPYTGKSISLTKLFTSAYQIEHVIPQSRYFDDSFSNKVICESEVNSLKDNMLGYEFIKNHGGEIIHCTMLGDVKVLSESEYKAFVNDHYAHNKRKRENLLLEDIPQEFLNRQMNDSRYISKVVKALLSNIVRAEGEEEATSKFVVSCSGGITDRLKKDWGLNDVWNKIVYPRFERLNRLTGTEAFGQWENKDGKRVFQTAVPLELQRGFNKKRIDHRHHAMDALVIACTSRNIINYLNNESANNPKKREDLRQKLCDKNRTIRKPWETFTQDATAALEDVIVSFKNYVRIINKATNYYERYDVEGKKVIAEQRGDDMWAIRKPMHEATYYGRVNLRRKKKVNLRVALENISSICDNKLRIYINGLVEKGFNTKQILDKFKNTNDHFSMQKIDKVEIWQFTNEEEKLVATRKPLDTSFDTKKIASITDTGIQTILLNYLETKGGDSTIAFTPEGIVEMNQNISKYNNGKEHMPILKVRLYTKLGKKIPVGQTGCKAKQFVIAEAGTNLYFAIYEDEEGKRSYRTIPLNEVVERLKQGLSPVPEKNDKDVHLKFYLSPNDLVYVPIEDEHESLAKDHIYKFVDSSGTTANFIPHRSANVIFELNKKDAEKFCSGSIIQNEYGVGSSQSKNQKAITGEMIKAVCRKLEVDRLGNVIKVI

SEQ ID NO: 120 - protein, 1082 aa, Neisseria cinerea
MAAFKPNPMNYILGLDIGIASVGWAIVEIDEEENPIRLIDLGVRVFERAEVPKTGDSLAAARRLARSVRRLTRRRAHRLLRARRLLKREGVLQAADFDENGLIKSLPNTPWQLRAAALDRKLTPLEWSAVLLHLIKHRGYLSQRKNEGETADKELGALLKGVADNTHALQTGDFRTPAELALNKFEKESGHIRNQRGDYSHTFNRKDLQAELNLLFEKQKEFGNPHVSDGLKEGIETLLMTQRPALSGDAVQKMLGHCTFEPTEPKAAKNTYTAERFVWLTKLNNLRILEQGSERPLTDTERATLMDEPYRKSKLTYAQARKLLDLDDTAFFKGLRYGKDNAEASTLMEMKAYHAISRALEKEGLKDKKSPLNLSPELQDEIGTAFSLFKTDEDITGRLKDRVQPEILEALLKHISFDKFVQISLKALRRIVPLMEQGNRYDEACTEIYGDHYGKKNTEEKIYLPPIPADEIRNPVVLRALSQARKVINGVVRRYGSPARIHIETAREVGKSFKDRKEIEKRQEENRKDREKSAAKFREYFPNFVGEPKSKDILKLRLYEQQHGKCLYSGKEINLGRLNEKGYVEIDHALPFSRTWDDSFNNKVLALGSENQNKGNQTPYEYFNGKDNSREWQEFKARVETSRFPRSKKQRILLQKFDEDGFKERNLNDTRYINRFLCQFVADHMLLTGKGKRRVFASNGQITNLLRGFWGLRKVRAENDRHHALDAVVVACSTIAMQQKITRFVRYKEMNAFDGKTIDKETGEVLHQKAHFPQPWEFFAQEVMIRVFGKPDGKPEFEEADTPEKLRTLLAEKLSSRPEAVHKYVTPLFISRAPNRKMSGQGHMETVKSAKRLDEGISVLRVPLTQLKLKDLEKMVNREREPKLYEALKARLEAHKDDPAKAFAEPFYKYDKAGNRTQQVKAVRVEQVQKTGVWVHNHNGIADNATIVRVDVFEKGGKYYLVPIYSWQVAKGILPDRAVVQGKDEEDWTVMDDSFEFKFVLYANDLIKLTAKKNEFLGYFVSLNRATGAIDIRTHDTDSTKGKNGIFQSVGVKTALSFQKYQIDELGKEIRPCRLKKRPPVR

SEQ ID NO: 121 - protein, 1512 aa, Fibrobacter succinogenes
MKKILGLDLGTNSIGWAVVNADEITRDDGSRYLKPNGISAAGSRIIPMSADILGDFEKGNSISQTAERTRMRMARRLHERALLRRERLLRVLNLLDFLPKHFADKIDRYGKFTDDSEPKLAWRKNTEGKYEFIFQDAFNEMLAEFKDKQPEIVEEGKKIPYDWTIYYLRKKALEKALSKEELSWILLQFNQKRGYYQLRGEEEEIPQDKKIEYLAQKVVKVEATDQKKGDDVWYNVYLENGMIYRRTSKAPLDWEGKVKEFIVTTEVENDGETPKKDKEGNIKRSFRAPKEDDWTLLKKKTEADIENSHKTVGCYIYDSLLNNPKQKIIGKLVRTVERKFYKEELTQILKKQVELIPELRDDNLYKQCIEELYPINEAHRNTIAKTDFANLFINDILFYQRPLKSKKSQIDNCPYEERIFIDSKTGEKKKVPVKCIAKSNPLFQEFRLWQFIQNLRIYQREKEIDGKLLTDIDITSECLKSEEDYVRLFDWLNDRETIEQEDLLKHLFNTKKSKNKENPYRWNYVEDKVYPCNETRATILKGFSKCGINASVLSPELEMALWHILYSVEDKKEIETALTHFAQKQGWNDDFAKVFSKAKPFKKDYGSYSEKAIKKLLSLMRMGKYWNQDNIDKNTLDRIDKIINGEYDEKISNRVRDNAINLKDISDFRGLPVWLACYIVYDRHSEAKDCTKWNSPEEIDSYLKKFKQHSLRNPIVEQVVTETLRTVRDIWIQEEQIDEIHLELGRDLKNPADKRKKMSENILKNENTNLRIKAMLMEFMNPSMGIENVRPYSPSQQDILRIYEENALDNLTKDDKDFDFISKISKQAQPSKTDIIRYKCWLEQKYRSPYTGKTISLSKLFTPAYEIEHVIPQSLYFDDSFSNKVICEAEVNKLKDRQLGYKFIAEHHGEKVQLSQGEVVEILSVDAYEKFVKENYANNRIKMKKLLMESIPDEFIERQLNDSRYISKVVKGLLSNIVREKIDDENYEPEAVSKNLISCNGAITDRLKKDWGMNDVWNSIILPRFIRMNQITGKDCFTTTNAEGHLIPQMPLELQKGFNKKRIDHRHHAMDAIVIACTTRDHVNLLNNEAAHSKFNATRYQLQRKLRRFEKAVIDGKEREVAKEFLKPWDSFSSDSKNILENIIVSFKQNQRVINKTTNAFLHFDENGKKTFIKQGKGDSWAIRKSMHKDTVFGEINLRKVRSVSLNEAIKVPERVLNKKIKEKILELKNNKIDAKNIKKYIEENHTGGYGIDSSKIDVFYFTKETKERFFATRKTLDTSFNQAKIKDSIADSGIQKILLAHLKSKNGDAEQAFSPDGIDEMNKNIVELNNGKFHQPILKVRVYEKADKFAVGQKGNKKVKFVEAAKGTNLFFAIFEKDGKRSYLTIPLNVMIDCQKQYGNQWKNNIEAYLKEKELVEKDVKLQFILSPNDLVYLPTEGSIDKKRIYKVVSFTNNRLYAIPYAIAKSIVDKNEFTQLNKIEFTDNKESIKDACVPVIIDRLGNVIEFNGKRL

SEQ ID NO: 122 - protein, 1259 aa, Streptobacillus moniliformis
MKYILGLDLGVASIGWAVTEINEKGEPVGLIDANSVIFKPLDNDKGKLYNVERRDKRGSRRILRRKKHRVERTKMLLVNSSFLTNEEIDNLYVGKLDNIYEVRLKGLKEQLSKNEIARLMIYYCKNRGFKSNRKTEDLEILKSLGEKISEKDSDEKKLKPIIAKNTELIESKGLTPIEVIYMIRENDNSILGFKNKEGNYKFGFKRNQVIDEVRKILGTQQILSKEIVDEYIDILSSQRDFSDGPGGDSKYKIDYTKLAGKCKYTGEVRAVKSAPSYEIFTMLQKLNDIRYVKFTSEDKIEKKKLSKEVIHKLYDLVVEKNKTLTYDLIEKSIDEENIKLLNIPKLSKSKYVELRKSYFKERNDNENLTEEEINAFNEKLNNERMKQELIRNNLKAYKELKSKFKKNNIDENRIKELGGIYFLDLVAELLTYSKTDEKLEYFVENVERYSLFKEQRDIVEIIKTFPNYTKNGNLSLSLVRELNKLLMEGHDYESSLSSLNYYIDTDVDWEKFPTISEIEDSLSTKITNPNVKHILVILRKLYNTLLFKYGRPEKVHLELSRDFSNDFSTRNKIQKEQLENKVRREVAAFEMYGANKDIVAGKDRLSNDDFVRIKLWEEQNKVCMYSGRTIEKYQLTSAEVQIDHILPYSKSFDNSYSNKVLVFSNENQDKKERTPYQWLKGTEKWNEFKQRVRLNLNISNKKKENLLFEDEVVNNEFLERELHATSYSSRLALNIFQRLIPVSDEDKYDEHGNEKVKYLYNRNVIAFQGKMTSMLRNLYSLNKYTHSFESDTLDIDNKAFILKEFEINKDNLKMTAYNVNTGLEITSETKVEKNKSGEFKTIKDELLKKELDKKENLIEISDYFKDKVLFDLKIVDFEEIDTVEPEIISILYKMITALKEEVYSKNRENHLHHSLDAFLLTIMNRSMQMKLIKYNQLISVLKNKEIEIFNEEKGEYIDSKEFAEELQKQKIIDIDGNERGIKFNVNGKTHRLNLVKPYENFLDDIKNKIFDKRENNKLPYHVVKSKVSGALHAETILGESKGEITKRISVFDINYKNLGKIFDKDGSQKEIYETLVKWLEAKSKDYPKLKNGNIIKKVKIVDGNKDKLIKLGNKRYVEMGRTTVKILVLKKEAEEGLKFASIGRYKYNLLKSEKDVNISIWKDAIHFCKVRYNKLKENGYRLIHELIPGETIELELNKGNISKCLVVGFSGGKIEISSVIGDALDLINDKISTRIKERYYITVSTIKSIKKINKNILGD

SEQ ID NO: 123 - protein, 1091 aa, Mobiluncus mulieris
MDSRKYRVGIDVGTNSVGFAAVEEDDSGSPTRFLNTMVVIHDSGVDPEQKKYAITRLASAGTARRTRRLYRTRRQRLRELDDFISNELGYPLVNLENFADPYEPWKVRADLATTKLPNDELPEAMSIALRHMARHRGWRSPYQRVEALHLHAEISKEFAALKERVVEKTGDVFSDDATPAEVLVDLMGRQKVRGADGVLSGKLRQSDNANELRKIASVQGIDDETLNRIIDRVFSSKSPKGKASERVGMDALPGQGSKPRALKAMPSFQKFRVVSVICNLRIKDSGGDARPLSMEEKEKLIDYLMSSTTDDHVTWTDVADLLHVKRSQLQGTAKEGFDGERPYTRPPVNSTWSKIKDSKIKSLVALWKTGDVDVQSAIVEALSNASVLEDSRPGADIVVAYLESLDDKELESLDKVGLPAGRASYSEDSLERLTERMLRDDCDLFEARKREFNVADDWKPPADPIYAPVGNPGVDRVLKIVNRLLMAAEREWGAPTQINIEHVRSGFSSELMQREFERENERRRAQNEEAVKAILTEKGGNSRVSKYDITRYYAVKRQHCQCLYCGTPITFSDCELDHIVPRKGVGSTNTRVNLAAACRSCNRDKSNLPFAVWAGKASNFDVSIDDAVSRVKQWQRSQNEGVREFRAFQNEVISRLLKTTEDPEIDSRSLESVAWMARELHHRVEYYFQSKGAQTQVSVYRGAVTAQARKSSGLEDKVKMIGGGGKTRLDRRHHAMDAATIALMTPGISTTLSEKNNLRDAQKFTGQSETWKDYCGRTETARKHFAVWKSNMERLTDLFNDKLENDAIPVVQPLRLRLSNSKAHDDGIGKLDSKKLGSVWSLADIDRAATPQIWTALTRCDDFDPTKGLPENANRVIRAQGVKYESEDNIPVFPSNVAAIAVRDGYAEIGSTIHHARIYRIDDGKKTFYSMIRVFAVDLLKHQAEDLFTVKLPPSAISIRTCEDSLRRALSNGTAEYLGWLVPGDEIIVDTSDKAFHTGQIGDLLRNFPVNSFRLTGFPSNSRLRLKPVLLAGEGLRDDAEDSIKKILLGQGWRPAINVLFSKGKPRIVRRNSLGIERPSSNNGLPFSWEA

SEQ ID NO: 124 - protein, 872 aa, Candidatus Parvarchaeum
MLGSSRYLRYNLTSFEGKEPFLIMGYYKEYNKELSSKAQKEFNDQISEFNSYYKLGIDLGDKTGIAIVKGNKIILAKTLIDLHSQKLDKRREARRNRRTRLSRKKRLARLRSWVMRQKVGNQRLPDPYKIMHDNKYWSIYNKSNSANKKNWIDLLIHSNSLSADDFVRGLTIIFRKRGYLAFKYLSRLSDKEFEKYIDNLKPPISKYEYDEDLEELSSRVENGEIEEKKFEGLKNKLDKIDKESKDFQVKQREEVKKELEDLVDLFAKSVDNKIDKARWKRELNNLLDKKVRKIRFDNRFILKCKIKGCNKNTPKKEKVRDFELKMVLNNARSDYQISDEDLNSFRNEVINIFQKKENLKKGELKGVTIEDLRKQLNKTFNKAKIKKGIREQIRSIVFEKISGRSKFCKEHLKEFSEKPAPSDRINYGVNSAREQHDFRVLNFIDKKIFKDKLIDPSKLRYITIESPEPETEKLEKGQISEKSFETLKEKLAKETGGIDIYTGEKLKKDFEIEHIFPRARMGPSIRENEVASNLETNKEKADRTPWEWFGQDEKRWSEFEKRVTSLYSKKKISERKREILLNKSNEYPGLNPTELSRIPSTLSDFVESIRKMFVKYGYEEPQTLVQKGKPIIQVVRGRDTQALRWRWHALDSNIIPEKDRKSSFNHAEDAVIAACMPPYYLRQKIFREEAKIKRKVSNKEKEVTRPDMPTKKIAPNWSEFMKTRNEPVIEVIGKVKPSWKNSIMDQTFYKYLLKPFKDNLIKIPNVKNTYKWIGVNGQTDSLSLPSKVLSISNKKVDSSTVLLVHDKKGGKRNWVPKSIGGLLVYITPKDGPKRIVQVKPATQGLLIYRNEDGRVDAVREFINPVIEMYNNG

SEQ ID NO: 125 - protein, 1229 aa, Pediococcus acidilactici
MGDRKYNLGLDIGTSSIGFAAVDENNQPIRVKGKTAIGVRLFEEGKTAADRRGFRTTRRRLSRRRWRINLLNEIFDAHLAEVDPTFLARLKESNRSNLDPKKSFQGSLLFPERKDYQFYEEYPTIYHLRKALMEKDRKFDIREIYLAVHHIIKYRGNFLNGTPMRSFKVENIELNTLFDQLNQLYAEIVPDNELAFDLAQVADVKDVLSSTTIYKMDKKKQLVKMMLLPASNKALQSENKKIVTQFVNAILNYKFKLDVLLQVETDADWSLKLNDEGADDKLEEFTGDLDENRLEIIDLLQRLHNWFSLNEITKDGNSLSAAMVEKYENHHHHLGLLKKVIENHPDAKKAKALKETYTAYVGKTDDKTQNQDDFYKAVEKNLDDSPDAKGIKRLIQLDQFMPKQRTGQNGAIPHQLHQQELDQIIEKQSKYYPFLAEPNPNVKRRKDAPYKLDELIAFKIPYYVGPLVTPEEQAQNKENVFAWMKRKAAGPITPWNFDEKVDRMESANRFIRRMTTKDTYLFGEDVLPAESMIYQKFVVLNELNNLKINGRHLSLKDKQDVYNDLFKQQKTVSIKALQNYYVTKKKAATAPTVGGLADPKKFLSSLSTYIDFKNMFGERVNDPQFQEDLEQIVEWSTIFEDRGIFKAKLQALGWLSEKQIQQLVAKRYKGWGRLSKKLLTGLKNAEGYSILDEMWRSTENFMQIQSRPEFAALIQQANEKQFEGNDPDNVWENIENILGDAYTSPQNKKAIRQVVKVVQDIEKAVGNPPEKIAIEFTREAAANPQRTQSRLRTLEKLYESAEEVVDAGLTAELAEFKENKHVLSDKYYLYFTQLGRDVYTGDTISLDKLNDYDVDHILPQSFIKDDSLDNRVLTIRAVNNGKSDNVPAKMFGKKMGSFWRHLLDNGMISKRKYNNLITDPDNISKYAQKGFINRQLVETSQVIKLTANILNGIYDKDTEIIEVPAKMNSQMRKMFDLVKVREVNDYHHAFDAYLTIFIGNYLYKCYPKLRPYFVYDNFKKFGNKEDIGHKRFNFLGKIEREKKVVAPETGEILWSNVAPNETIKQIKKVYNYKFMIVSREITTRRAELFNQTVYPKNYRGKLIPIKEDRPTDLYGGYSGNTDAYLAIVALEDKKKGKYFKVVGIPTRAAAKLEKLKQQDSQQYLQALHEVIAPQFTKSTKKGIKKTEFEIVLDKVHYRQLVQDGPVKMMLGSSTYKYNAKQLVLSEKAL

SEQ ID NO: 126 - protein, 1398 aa, Veillonella parvula
METQASNQLISSHLKGYPIKDYFVGLDIGTSSVGWAVTNKAYELLKFRSHKMWGSRLFDEGESAVARRGFRSMRRRLERRKLRLKLLEELFADAMAQVDPTFFMRLRESKYHYEDKTTGHSSKHILFIDKNYNDQDYFKEYPTVYHLRSELMKSGTDDIRKLFLAVHHILKYRGNFLYEGATFDSNASTLDDVIKQALENITFNCFDCNSAISSIGQILMEAGKTKSDKAKAIEHLVDTYIATDTVDTSSKTQKDQVKEDKKRLKAFANLVLGLNASLIDLFGSVEELEEDLKKLQITGDTYDDKRDELAKAWSDEIYIIDDCKSVYDAIILLSIKEPGLTISESKVKAFNKHKDDLAILKSLLKSDRSIYNTMFKVDEKGLHNYVHYIKQGRTEETSCNREDFYKYTKKIVEGLSDSKDKEYILSQIELQILLPLQRIKDNGVIPYQLHLEELKAILAKCGPKFPFLNEVADGFSVAEKLIKMLEFRIPYYVGPLNTHHNVDNGGFAWAVRKASGRVTPWNFDDKIDREKSAAAFIKNLTNKCTYLLGEDVLPKSSLLYSEFMLLNELNNVRIDGKPLEKVVKEHLIEAVFKQDHKKMTKNRIEQFLKDNGYISETHKHEITGLDGEIKNDLASYRDMVRILGDGFDRSMAEEIITDITIFGESKKMLRETLRKKFASCLDDEAIKKLTKLRYRDWGRLSQKLLNGIEGCDKAGDGTPETIIILMRNFSYNLMELLGDKFSFMERIQEINAKLTEGQIVNPHDIIDDLALSPAVKRAVWQALRIVDEVAHIKKALPARIFVEVTRSNKNEKKKKDSRQKRLSDLYAAIKKDDVLLNGLNNEIFGELKSSLAKYDDAALRSKKLYLYYTQMGRCAYTGEIIELSLLNTDNYDIDHIYPRSLTKDDSFDNLVLCKRTANAQKSDAYPISEEIQKTQKPFWTFLKQQGLISERKYERLTRITPLTADDLSGFIARQLVETNQSVKAATTLLRRLYPGVDVVFVKAENVTDFRHDNNFIKVRSLNHHHHAKDAYLNIVVGNVYHERFTRNFRAFFKKNGANRTYNLAKMFNYDVNCTNAKDGKAWDVKTSMDTVKKMMDSNDVRVTKRLLEQTGALADATIYKATVAGKAKDGAYIGMKTKSSVFADVSKYGGMTKIKNAYSIIVQYTGKKGEVIKEIVPLPIYLTNRNTTDQDLINYVASIIPQAKDISIIYGKLCINQLVKVNGFYYYLGGKTNSKFCIDNAIQVIVSNEWIPYLKVLEKFNNMRKDNKDLKANVVSTRALDNKHTIEVRIVEEKNIEFFDYLVSKLKMPIYQKMKGNKAAELSEKGYGLFKKMSLEEQSIHLIELLNLLTNQKTTFEVKPLGITASRSTVGSKISNQDEFKVINESITGLYSNEVTIV

SEQ ID NO: 127 - protein, 1485 aa, Prevotella bivia
MKNILGLDLGTNSIGWAKISIDDNGKYIKDSIKLGSRIIPMSQDVLSNFSKGVTLSQTSERTSFRGARRLRERTLLRRERLHRILHLLGFLPKHYEKAIGWDRNDNKTYGKFINHAEPKLAWCKDNNGKMRFLFMDSFHDMLSEFSEKHPELLANGKKIPLDWTIYYLRKKALYKAITKEELAWILLNFNQKRGYYQLRGEEDRDSEANKKEYLELKVIGVEATGEKKGNDIWYNIHLENGWIYRRSSKNPLNDWLGKVKSFIVTTDLDADGNPKKDKDGNIKRSFRAPSEGDWTLIKKRTESLLENSGQTVGQFIYNHILEEPSAKIRGNFIRTIERKYYKDELKAILEKQKEFHHELSSESLLTECAKELYKRNIAHQEVLLKKGIIHLLLNDILFYQRPLKIKKSLIDNCPYENYKYVDKKSGDIKVKSIKCIAKSNPFFQEFRLWQFVSNLRLYRKSDDKDVTSEHLVTTDDYANLFTYLNNRKDIKQSVLLKEYFKIKKVKTINGAEYPVRWNYIDDDNKTYPCNETRYDILHALSKTELKSEWLTPERTYRLWHLLYSIESKEETKKALNKLNLSDDFTEAFLTIKPFKKEYGSYSEKAIKKLLSLMRMGYLWSEDEAIKQVGAEIEKTIEGELPDYVLQRLEKSQHNYNKISDFSGLPLWLASYIIYGRHSEAKEIIHWDNPESMMAYIKDFRQHSMRNPIVEQCVLETLRTVHDIWKEIGHIDEIHIELGREMKSTSEQRKAITQNVLHNQNTNIRIKLLLQELKNDNNITGVRPYSPMQQEILRIYEEGALQGLTKEDKDYNDILKISQTAQPTSNELTRYKLWLEQKYRSPYTGKAISLSKLFTSAYQIEHVIPQSRYFDDSLSNKVICESEVNTLKKAMLGMEFIKTCGGQKVHCTLLGDVEIYNEEDYKAFVNEHYSNNRTKRNKLLMEDIPQEFINRQLNDSRYISKMVKQLLSAIVRGQEEVEATSKFVIPCTGGITDRLKKDWGLNDIWNNLVSPRFQRMNALTGSEYFGHWENKEGKRVFQTTMPIQLQQGFSKKRIDHRHHAMDALVIACASRNIISYLNNETAQDTERRRDLRQKLCDKGGSVRKPWDSFTQDTQYALKDIIVTFKNYVRIINKATNYYEHYKTDGKKGMISQKGDELWAIRKPMHKETVFGKVNLRRPKRVSLSKAIDSVDIICNRKLKKYIKARLNEGLQKKQILNIFKELNNVWEGIDVNKIDIWEMSNDKEPMVATRKQLDTSFDEKKIRSISDTGIQKILLNYLITKNNNPELAFTPEGIQEMNSNISEYNDHKKHQPIYKVRVTEPLGAKYPIGTMGNNPKKFVEAQAGTNLYFAIYEDKEGKRNYDTIPLNIAAERLNQQLSPVPETNENNTPLKFYLSPNDLVYVPSEEERHSGNNIQLDKNRIYKMVSSTSKRCFFIHHRVAISLVDKKEFSAQNKMERSIDNEQVMIKSVCWKLITDRLGNIIKVIK

SEQ ID NO: 128 - protein, 1218 aa, Prevotella buccalis
MNKRILGLDTGTNSLGWAVVDWDEHAQSYELIKYGDVIFQEGVKIEKGIESSKAAERSGYKAIRKQYFRRRLRKIQVLKVLVKYHLCPYLSDDDLRQWHLQKQYPKSDELMLWQRTSDEEGKNPYYDRHRCLHEKLDLTVEADRYTLGRALYHLTQRRGFLSNRLDTSADNKEDGVVKSGISQLSTEMEEAGCEYLGDYFYKLYHEQGNKVRIRQRYTDRKKHYQHEFDAICEKQELSSELIEDLQRAIFFQLPLKSQRHGVGRCTFERGKPRCADSHPDYEEFRMLCFVNNIQVKGPHDLELRPLTYEEREKIEHLFFRKSKPNFDFEDIAKELAGKKNYAWIHDKEERAYKFNYRMTQGVPGCPTTAQLKSIFGDDWKTGIAETYTLIQKKNGSKSLQEMVDDVWNVLYSFSSVEKLKEFAHHKLQLDEENAEKFAKIKLSHSFAALSLKAIRKFLPFLRKGMYYTHASFFANIPTIVGKEIWNNEQSRKYIMENVGELVFNYQPKHRDVQGTIEMLIKDFLANNFELPAGATDKLYHPSMIETYPHALRNEFGILQLGSPRTNAIRNPMAMRSLHVLRRVVNQLLKESIIDENTEVHVEYARELNDANKRRAIADRQKEQDKQHKKYGDEIRKLYKEETGKDIEPTQTDVLKFQLWEEQNHYCLYTGEQIGITDFIGSNPKFDIEHTIPQSVGGDSTQMNLTLCDNRFNREVKKAKLPTELANHEEILTRIEPWKNKYEQLVKERDKQRTFAGMDKAVKDIRIQKRHKLQMEIDYWRGKYERFTMTEVPEGFSRRQGTGIGLISRYAGLYLKSLFHQADSRNKSNVYVVKGVATAEFRKMWGLQSEYEKKCRDNHSHHCMDAITIACIGKREYDLMAEYYHMEETFRQGRGSKPKFSKPWATFTEDVLNIYKNLLVVHDTPNNMPKHTKKYVQTSKGKVLAQGDTARGSLHLDTYYGAIERDGEIRYVVRRPLSSFTNPKELENIVDETVKRTIKEAIADKNFKQAIAEPIYMNEDKGILIKKVRCFANSVKQPINIRQHRDLSKKEYKQQYHVMNENNYLLAIYEGLVKNKVVREFEIVSYIEAAKYYKRSQDRNIFSSIVPTHSTKYGLPLKTKLLMGQQVLMFEENPDEIQVDNTKDLVKRLYKVVGIEKDGRIKFKHHQEARKEGLTIYSTPYKNNDDYVPIFRQSIKNINILVDGIDFNIDILGKVTLKE

SEQ ID NO: 129 - protein, 1218 aa, Prevotella timonensis
MNKRILGLDTGTNSLGWAVVDWDEHAQSYELIKYGDVIFQEGVKIEKGIESSKAAERSGYKAIRKQYFRRRLRKIQVLKVLVKYHLCPYLSDDDLRQWHLQKQYPKSDELMLWQRTSDEEGKNPYYDRHRCLHEKLDLTVEADRYTLGRALYHLTQRRGFLSNRLDTSADNKEDGVVKSGISQLSTEMEEAGCEYLGDYFYKLYDAQGNKVRIRQRYTDRNKHYQHEFDAICEKQELSSELIEDLQRAIFFQLPLKSQRHGVGRCTFERGKPRCADSHPDYEEFRMLCFVNNIQVKGPHDLELRPLTYEEREKIEPLFFRKSKPNFDFEDIAKALAGKKNYAWIHDKEERAYKFNYRMTQGVPGCPTIAQLKSIFGDDWKTGIAETYTLIQKKNGSKSLQEMVDDVWNVLYSFSSVEKLKEFAHHKLQLDEESAEKFAKIKLSHSFAALSLKAIRKFLPFLRKGMYYTHASFFANIPTIVGKEIWNKEQNRKYIMENVGELVFNYQPKHREVQGTIEMLIKDFLANNFELPAGATDKLYHPSMIETYPNAQRNEFGILQLGSPRTNAIRNPMAMRSLHILRRVVNQLLKESIIDENTEVHVEYARELNDANKRRAIADRQKEQDKQHKKYGDEIRKLYKEETGKDIEPTQTDVLKFQLWEEQNHHCLYTGEQIGITDFIGSNPKFDIEHTIPQSVGGDSTQMNLTLCDNRFNREVKKAKLPTELANHEEILTRIEPWKNKYEQLVKERDKQRTFAGMDKAVKDIRIQKRHKLQMEIDYWRGKYERFTMTEVPEGFSRRQGTGIGLISRYAGLYLKSLFHQADSRNKSNVYVVKGVATAEFRKMWGLQSEYEKKCRDNHSHHCMDAITIACIGKREYDLMAEYYRMEETFKQGRGSKPKFSKPWATFTEDVLNIYKNLLVVHDTPNNMPKHTKKYVQTSIGKVLAQGDTARGSLHLDTYYGAIERDGEIRYVVRRPLSSFTKPEELENIVDETVKRTIKEAIADKNFKQAIAEPIYMNEEKGILIKKVRCFAKSVKQPINIRQHRDLSKKEYKQQYHVMNENNYLLAIYEGLVKNKVVREFEIVSYIEAAKYYKRSQDRNIFSSIVPTHSTKYGLPLKTKLLMGQLVLMFEENPDEIQVDNTKDLVKRLYKVVGIEKDGRIKFKYHQEARKEGLPIFSTPYKNNDDYAPIFRQSINNINILVDGIDFTIDILGKVTLKE

SEQ ID NO: 130 - protein, 1487 aa, Prevotella timonensis
MKNILGLDLGSNSVGWALVKVEENGNPIGSIKMGSRIIPMSQDILGSFEKGDTVSQTAQRTLYRGKRRLIERHVLRRERLCRVLHIMNFLPAHFDRLLGWDKTDNKTYGKFIDDSEPKLAWRQNKNEMGKMEFVFMDSFHEMLSDFAKHQPQLIANGKKVPLDWTIYYLRKKALTQLISKEELAWILLNFNKKRGYYQLRGEEEEEQPTKKEEYKVLKVISVDADEGQKGNGIWYNIHLEDGGIYKKKSDIPLYDWVGKTLQLIVVTTYEKDGKTPKIFDSGKQNPSYRLPKEDDWGLVKKRTESQLQSSGKTVGAFIYDNILSKPDDKIRGNLVRTIERKYYKKELIEILQQQAKYHDELHNQNLLESCAKELYAHNDVHYNEVIKSNMINLLVNDIIFYQRPLKSKKSLIANCKYESYEYVDKETGEIKEMPIKCIAKSNPYYQEFRLWQFIHNLRLSDVVTREDVTAQYLSTPQDYCNLFTYLNDRKEIKQDILLKDFFKIKKVQIDKEKVFPIEWNYIKDATKSYPCNETRYELLSALKRAGMDKQWLDDTPNMQYRLWHLLYSVEEKEESAKALRKLYDDDKFVTSFLKIKPFNKCYGAYSEKAIKRLLTLMRMGKAWNEQAIDAKTLKCIQQIITDNVDSKLKEKIDDSRYVLHHVSDFQGLPTYLASYVIYGRHSEVTDIQCWDSPEDLLKFIRDFKQHSLRNPIVEQVILETLRVVYDIWKAEKHIDEIHVEVAREMKLTAQQRNEANLRNLNNEATNLRIKYLLEELKNDTFIKDVRPLSPIHQEKMRIYEQAVLGNLNKQDKDYDDIIKISKKEHPTNAELIRYKLWLEQRYCSPYTGKAISLSKLFTTAYEIEHIIPQSRYFDNSFNNKVICEAEVNKAKGNMLGYEFIKKQGGQKIYCTQLGKAVTILKEEAYKQFVNEHYAHNKRKRDNLLAENIPESFSSRQLNDTRYITKTIMSLLSNVVRQQSEEEATAKNLLPSSGSVTDRLKNDWGLKDVWNTIVTPRFERLNKLSGTNDFGEMKEENGNRYFQTNVPLEYEKGFKKKRIDHRHHAMDALVIACTTRNMVNYISNANANSPKQREDLRQLLCDKNRIINKPWDTFTQDALKALNDIVVSFKNNVRIINRATNRYQRYDKNGKKIIFSQKGDDMWAIRKSMHKETVFGRVNLIRKEVLPIAKALDNISAICNAQLRAYVNDLVDKHFNKKQLVAHFKSLNYKWNRQDVSKVEVWISSDNKTPMVAVRKPLDTSFDKKKIASITDTGIQTILLNYLESKGGDASVAFAPEGIQEMNSNIELYNNGKAHKPIKNVRLSEPLGAKYQVGERGAKTKKYVEADKGTNLFFAIYEDEEGKRYYYSVPLREAIERQKQKLSPVPEYNEKGVALKFYLSPNDLVYVPTEEERTMGTCHIDKARIYKMVSSTGCSCYFVPSTFAKVIVDKVELQSLNKMEKAITDECIKEVCWKLKVDRLGNIINVIK

SEQ ID NO: 131 - protein, 1138 aa, Bifidobacterium dentium
MLCRCHRRYRIGIDVGLMSVGLAAIEVDETGFPIRILNIQSVIHDGGIDPQLGKKKSISRKAISGVARRTRRMRRRKVVRLRQLDATLESLGFPIVEPDSLDTWEIWLTRAKLASSYIQDDETRKEDVSIALRHIARHRGWRNPYSNVESLFVDVAPSEQYEELRRKAEEKLGTSLSGNPTSAEIVECILKRQVGEVQLRTRSRKGVNGNAVEKEGLLPTKLMQSDNAAEIRRIFKVQRIDDETGRKLLRAVFKACSPKGSVERRVGRDALAPGLPRALKASLAFQEYRIANVLTNLVISEDGTKRKLTIAEKQRVFGFLSSNETDDITWIDVAEKLGLERRQIQGVGCLTADGEERISSTPPRNITALHIHSAKPVIREKLVAWWKAASPTVRETMVELLSNTVDIDRVREDMDYSSAVAFIDSLGDEELTALDSVDLLSGRAAYSRQTLKQLTERMLNTDDDLHEARKAVFGVDDNWKPPVDAISTSVGNPAVDRVLKIVNRYLLACQKRWRNPQSVQIEHVRESFSSVAKAKETERVQGERARYRNDLRRELCEQEGLNKIRESDIRRWESVQRQNGTCLYCGSPITFRTCEMDHIVPRKGVGSTNTRVNLAAACAACNKLKSNTAFSVWARTEGAANRKVSQRDAIERVKTFIFNKSVPPREQRAFKQAVISRLRQAESDPAIDNRSIESVAWMADELHRRIEAYFNQDADVSGNTPATQVWVFQGRVTALARKASGIEGRIHFAGEWKKTRLDRRHHAVDAAVIAMMNHSAAQTLVERDSLRLSQWITRKPETWKNYPFSEGQKKTRFKEWLDCMNALLDLLNDALDSDRVPVTRCQRMSLGNSQAHAATIRKMKRVELFSPMDADLIRRASTPALYCALTRLPEYSPEKGLPENRGREIVLNGRHIRSTETVDFFASGAAQLMVRNGSAEIGDSIHHMRIYRYRKTGAKSQEYVYGMIRVFQIDLLHASSENLFAVQLPSQSVSVRYGDKNVVQAIQEGRAEYLGHIVPNDEILISYEGVRMKDSEKIGAYANDFSGTASELAQRRHWVVVGSDVSKLALRPSYLSEEGLENSGSESERLSKQTRKVIEGKGWVVAVNILAKYHPVVIRRNALGEPRFRTNSGMPVSWRWDR

SEQ ID NO: 132 - protein, 587 aa, Neisseria subflava
MATSRSRIRSQTDAFGVVGSLVAFNQTSRLFVAKKNEGETADKELGALLKGVADNAHALQTGNFRTPAELALNKFEKESGHIRNQRGDYSHTFNRKDLQAELNLLFEKQKEFGNPHVSDGLKEGIETLLMAQRPALSGDAVQKMLGYCTFEPTEPKAAKNTYTAGRFIWLTKLNNLRILEQGSERPLTTTERATLMDEPYRKSKLTYAQARKLLGLEDTAFFKGLRYGKDNAEASTLMEMKAYHAISRALEKEGLKDKKSPLNLSPELQDEIGTAFSLFKTDEDITGRLKDRVQPEILEALLKHISFDKFVQISLKALRRIVPLMEQGKRYDEACAEIYGDHYGKKNAEEKIYLPPIPADEIRNPVVLRALSQARKVINAVVRRYGSPARIHIETAREVGKSFKDRKEIEKRQEENRKDREKAAAKFREYFPNFVGEPKSKDILKLRLYEQQHGKCLYSGKEINLGRLNEKGYIEIDHALPFSRTWDDSFNNKVLVLGSENQNKGNQTPYEYFNGKDNSREWQEFKARVETSRFPRSKKQRILLQKFDEDGIYRIGVKTALSFPKYQIDELGKEIRPCRLKKRPPVR

SEQ ID NO: 133 - protein, 1269 aa, Mycoplasma gallisepticum
MNNSIKSKPEVTIGLDLGVGSVGWAIVDNETNIIHHLGSRLFSQAKTAEDRRSFRGVRRLIRRRKYKLKRFVNLIWKYNSYFGFKNKEDILNNYQEQQKLHNTVLNLKSEALNAKIDPKALSWILHDYLKNRGHFYEDNRDFNVYPTKELAKYFDKYGYYKGIIDSKEDNDNKLEEELTKYKFSNKHWLEEVKKVLSNQTGLPEKFKEEYESLFSYVRNYSEGPGSINSVSPYGIYHLDEKEGKVVQKYNNIWDKTIGKCNIFPDEYRAPKNSPIAMIFNEINELSTIRSYSIYLTGWFINQEFKKAYLNKLLDLLIKTNGEKPIDARQFKKLREETIAESIGKETLKDVENEEKLEKEDHKWKLKGLKLNTNGKIQYNDLSSLAKFVHKLKQHLKLDFLLEDQYATLDKINFLQSLFVYLGKHLRYSNRVDSANLKEFSDSNKLFERILQKQKDGLFKLFEQTDKDDEKILAQTHSLSTKAMLLAITRMTNLDNDEDNQKNNDKGWNFEAIKNFDQKFIDITKKNNNLSLKQNKRYLDDRFINDAILSPGVKRILREATKVFNAILKQFSEEYDVTKVVIELARELSEEKELENTKNYKKLIKKNGDKISEGLKALGISEDEIKDILKSPTKSYKFLLWLQQDHIDPYSLKEIAFDDIFTKTEKFEIDHIIPYSISFDDSSSNKLLVLAESNQAKSNQTPYEFISSGNAGIKWEDYEAYCRKFKDGDSSLLDSTQRSKKFAKMMKTDTSSKYDIGFLARNLNDTRYATIVFRDALEDYANNHLVEDKPMFKVVCINGSVTSFLRKNFDDSSYAKKDRDKNIHHAVDASIISIFSNETKTLFNQLTQFADYKLFKNTDGSWKKIDPKTGVVTEVTDENWKQIRVRNQVSEIAKVIEKYIQDSNIERKARYSRKIENKTNISLFNDTVYSAKKVGYEDQIKRKNLKTLDIHESAKENKNSKVKRQFVYRKLVNVSLLNNDKLADLFAEKEDILMYRANPWVINLAEQIFNEYTENKKIKSQNVFEKYMLDLTKEFPEKFSEFLVKSMLRNKTAIIYDDKKNIVHRIKRLKMLSSELKENKLSNVIIRSKNQSGTKLSYQDTINSLALMIMRSIDPTAKKQYIRVPLNTLNLHLGDHDFDLHNMDAYLKKPKFVKYLKANEIGDEYKPWRVLTSGTLLIHKKDKKLMYISSFQNLNDVIEIKNLIETEYKENDDSDSKKKKKANRFLMTLSTILNDYILLDAKDNFDILGLSKNRIDEILNSKLGLDKIVK

SEQ ID NO: 134 - protein, 1354 aa, Prevotella melaninogenica
MADFAKYQPGMVADGRKIPLDWTLYYLRKKALTQAIRKEELAWILLNFNQKRGYYQLRGEEEEENSTKHEEYYELKVVSVEAAEEGKGGNTWYNVTLENGWIYRRQSKIELNDWVGKVRPFIVTTEYEIDGVTIKKDKNGEVKRSFRAPSENDWGLRKKRTESLLEESGKTVGAFIYNHILSEPADKIRGNFIRTIERKFYKKELEAILREQSKHQKELKDIDTLIACIKELYPNNKPHQDSLIKKDMTYLLITDLIFYQRPLKSKKSLIADCPYEYYEYVIKETGENKRQSIKCIAKSNPYYQEFRLWQFIINLRLFDRNNDKEVTSEYLSSMEDYTRLFTYLNDRKDINQETLLKDFFKQKKVKRGMEKEFPIRWNYIEDKEKKYPCNETRHELLTALGKVGIDHSWLDDKELFYRLWHLLYSVESKEEAEGALRKLVDNDDFVNAFLKIKPFKKEYGAYSEKAIKKLLAVMRMGNLWNEVDICEQTRDRIQNIIKGDIDEKIKDRMGRTFSQLSDFQGLPEWLACYVVYGQHSEATDIQRWTKPENLMAYINGFKQHSLRNPIVEQCILETLRTVHDIWKEAGHIDEIHIELGRGMKSTADQRARMSKSIMQNENTNLRIKSLLMELKNAKEFENVRPYSPMQQEILRIYEEGALQELTKEDAQYNEISKISQMAQPSANELLKYRLWLEQKYCSPYTGKPISLSKLFTSAYQIEHIIPQSRYFDDSFTNKVICEAEVNQLKSNMLGYEFIKKHGGEIVRCTMIGDVKLLDAKEYYNFVTEHYTNNRRKKEKLLMEDIPQEFLNRQMNDSRYISKKVMAILSNIVREEDEQEAKSKFVIACSGGITDRLKQDWGLNDVWNSIVYPRFERLNKLTNTENFGRWENKKGKQVFQTSVPLELQKDFSKKRIDHRHHAMDALVIACASNNIINYLNNESAKSQEKREDLRKKLCDKNRIIRKPWETFTQDAHTALENVVVSFKNYIRVINKATNYYEKYDKNGKKEIAEQKGQDMWAIRKPMHKETVFGQVNLRRKITIKLKDALEKIPAICDKELRDYINILVAKQFNKKQILAHFKSINYRLNMKSVDKVDVWQFSNEKEPMVATRKSVDTSFDTKRIATITDTGIQKILLNYLKAKNNDPNIAFTPEGIAEMNKHITEYNNGKQHQPILKVRVSEPKGAKYQVGETGNKRSKFVEAQKGTNLYFAIYEDKEGNRSYNTIPLNEVIERLKQGLSPVPDANEKSIPLKFHLSPNDLVYVPKTDEENEIKMGQIYKFVDSSGTTANFVPHRVSNLIYNVDKKIAENFCNHEIIQNEYGIGSPQSKNQKSITGEMIKAVCWKLEVDRLGNIHKIIK

SEQ ID NO: 135 - protein, 1130 aa, Streptococcus gallolyticus
MTNGKILGLDIGIASVGVGIIEAKTGKVVHANSRLFSAANAENNAERRGFRGSRRLNRRKKHRVKRVRDLFEKYEIVTDFRNLNLNPYELRVKGLTEQLTNEELFAALRTISKRRGISYLDDAEDDSTGSTDYAKSIDENRRLLKTKTPGQIQLERLEKYGQLRGNFTVYDENGEAHRLINVFSTSDYEKEARKILETQADYNKKITAEFIDDYVEILTQKRKYYHGPGNEKSRTDYGRFRTDGTTLENIFGILIGKCSFYPDEYRASKASYTAQEYNFLNDLNNLKVPTETGKLSTEQKEALVEFAKSTATLGPAKLLKEIAKILDCKVDEIKGYREDDKGKPDLHTFEPYRKLKFNLDSVNIDDLSREVLDKLADILTLNTEREGIEDAIRHNLPNQFTEGQISEIIKVRKSQSTAFNKGWHSFSAKLMNELIPELYATSDEQMTILTRLEKFKVNKKSSKNTKTIDEKEVTDEIYNPVVAKSVRQTIKIINAAVKKYGDFDKIVIEMPRDKNADDEKKFIDKRNKENKKEKDDALKRAAYLYNGTDKLPDEVFHGNKQLETKIRLWYQQGERCLYSGKPIPIQELVHNSNNFEIDHILPLSLSFDDSLANKVLVYAWTNQEKGQKTPYQVIDSMDAAWSFREMKDYVLKQKGLGKKKRDYLLTTENIDKIEVKKKFIERNLVDTRYASRVVLNSLQSALRELGKDTKISVIRGQFTSQLRRKWKIDKSRETYHHHAVDALIIAASSQLKLWEKQDNPMFVDYGNNQVVDKQTGEILSVSDDEYKELVFQPPYQGFVNMISSKGFEDEILFSYQVDSKYNRKVSDATIYSTRKAKIGKDKKEETYVLGKIKDIYSQNGFDTFIKKYNKDKTQFLMYQKDPLTWENVIEVILRDYPTTKKSEDGKNDVKCNPFEEYRRENGLVCKYSKKGKGTPIKSLKYYDKKLGNCIDITPEGSKNEVVLQSLNPWRADVYFNPETLKYELLGLKYSDLSFEKGTGKYHISQEKYDVIKEKEGIGKKSEFKFTLYRNDLILIKDTASGEQEIYRFLSRTMPNVKHYAELKPYDKEKFDNVQELVEALGEADKVGRCIKGLNKSNLSIYKVRTDVLGNKYFVKKEGDKPKLDFKNNKK

SEQ ID NO: 136 - protein, 1371 aa, Streptococcus gallolyticus
MTEKNYSIGLDIGTNSVGWAVITDDYKVPAKKMKVLGNTDKKYIKKNLLGALLFDNGETAEATRLKRTARRRYTRRKNRLRYLQEIFAEEMAKVDESFFYRLDESFLTTDDKDFERHPIFGNKADEIKYHQEFPTIYHLRKHLADSHEKADLRLIYLALAHMIKFRGHFLIEGELNAENTDVQKLFEAFVEVYDRTFDDSNLSEITVDASSILTEKFSKSRRLENLIKHYPTEKKNTLFGNLVALALGLQPNFKTSFKLSEDAKLQFSKDTYEEDLEELIGKIGDEYADLFTSAKNLYDAILLSGILTVADNTTKAPLSASMIKRYNEHQVDLKKLKEFIKNNASDKYDEIFNDKDKNGYAGYIENGVKQDEFYKYLKTTLSKIDGSDYFLDKIEREDFLRKQRTFDNGSIPHQIHLQEMHAILRRQGEHYAFLKENQAKIEKILTFRIPYYVGPLARKNSRFAWAEYHSDEKITPWNFDEIIDKEKSAEKFITRMTLNDLYLPEEKVLPKHSLVYETYTVYNELTKVKYVNEQGKSNFFDANMKQEIFEHVFKENRKVTKDKFLNYLNKEFPEYRIQDLIGLDKENKSFNASLGTYHDLKKILDKSFLDDKTNETIIEDIIQTLTLFEDRDMIRQRLQKYSDIFTPQQLKKLERRHYTGWGRLSYKLINGIRNKENGKSILDYLIDDGYANRNFMQLISDDTLPFKQIIKDAQIIGDIDDVTSVVRELPGSPAIKKGILQSVKIVDELVKVMGHNPDNIVIEMARENQTTNRGRNQSQQRLKKLQDSLKELGSNILNEEKPSYIEGKVENNHLQDDRLFLYYIQNGKDMYTGDELDIDHLSDYDIDHIIPQAFIKDDSIDNRVLTSSAKNRGKSDDVPSLDIVHDRKADWIRLYKSGLISKRKFDNLTKAERGGLTENDKAGFIKRQLVETRQITKHVAQILDSRFNTERDENDKVIRNVKVITLKSNLVSQFRKDFKFYKVREINDYHHAHDAYLNAVVGTALLKKYPKLAPEFVYGEYKKYDIRKFITSSGDKATAKYFFYSNLMNFFKRVIRYSNGKVVVRPVIECSKDTGEIAWNKQTDFEKVRRVLSYPQVNIVKKVETQTGGFSKESILPKGNSDKLIPRKTKKFRWDTPKYGGFDSPNIAYSVFVIADVEKGKAKKLKTVKELVGISIMERSSFEENPVVFLEKKGYQNVQEDNLIKLPKYSLFEFEGGRRRLLASASELQKGNEVVLSRHLVELLYHAHRVNSFNNSEHLKYVSEHKKEFGEVLSCVENFAKSYVDVEKNLGKIRAVADKIDTFSIEDISISFVNLLTLTALGAPADFNFLGEKIPRKRYTSTKECLNATLIHQSITGLYETRIDLSKLGEE

SEQ ID NO: 137 - protein, 1168 aa, Azospirillum sp.
MARPAFRAPRREHVNGWTPDPHRISKPFFILVSWHLLSRVVIDSSSGCFPGTSRDHTDKFAEWECAVQPYRLSFDLGTNSIGWGLLNLDRQGKPREIRALGSRIFSDGRDPQDKASLAVARRLARQMRRRRDRYLTRRTRLMGALVRFGLMPADPAARKRLEVAVDPYLARERATRERLEPFEIGRALFHLNQRRGYKPVRTATKPDEEAGKVKEAVERLEAAIAAAGAPTLGAWFAWRKTRGETLRARLAGKGKEAAYPFYPARRMLEAEFDTLWAEQARHHPDLLTAEAREILRHRIFHQRPLKPPPVGRCTLYPDDGRAPRALPSAQRLRLFQELASLRVIHLDLSERPLTPAERDRIVAFVQGRPPKAGRKPGKVQKSVPFEKLRGLLELPPGTGFSLESDKRPELLGDETGARIAPAFGPGWTALPLEEQDALVELLLTEAEPERAIAALTARWALDEATAAKLAGATLPDFHGRYGRRAVAELLPVLERETRGDPDGRVRPIRLDEAVKLLRGGKDHSDFSREGALLDALPYYGAVLERHVAFGTGNPADPEEKRVGRVANPTVHIALNQLRHLVNAILARHGRPEEIVIELARDLKRSAEDRRREDKRQADNQKRNEERKRLILSLGERPTPRNLLKLRLWEEQGPVENRRCPYSGETISMRMLLSEQVDIDHILPFSVSLDDSAANKVVCLREANRIKRNRSPWEAFGHDSERWAGILARAEALPKNKRWRFAPDALEKLEGEGGLRARHLNDTRHLSRLAVEYLRCVCPKVRVSPGRLTALLRRRWGIDAILAEADGPPPEVPAETLDPSPAEKNRADHRHHALDAVVIGCIDRSMVQRVQLAAASAEREAAAREDNIRRVLEGFKEEPWDGFRAELERRARTIVVSHRPEHGIGGALHKETAYGPVDPPEEGFNLVVRKPIDGLSKDEINSVRDPRLRRALIDRLAIRRRDANDPATALAKAAEDLAAQPASRGIRRVRVLKKESNPIRVEHGGNPSGPRSGGPFHKLLLAGEVHHVDVALRADGRRWVGHWVTLFEAHGGRGADGAAAPPRLGDGERFLMRLHKGDCLKLEHKGRVRVMQVVKLEPSSNSVVVVEPHQVKTDRSKHVKISCDQLRARGARRVTVDPLGRVRVHAPGARVGIGGDAGRTAMEPAEDIS

SEQ ID NO: 138 - protein, 1345 aa, Streptococcus mutans
MKKPYSIGLDIGTNSVGWAVVTDDYKVPAKKMKVLGNTDKSHIKKNLLGALLFDSGNTAADRRLKRTARRRYTRRRNRILYLQEIFAEEMSKVDDSFFHRLEDSFLVTEDKRGERHPIFGNLEEEVKYHENFPTIYHLRQYLADNPEKVDLRLVYLALAHIIKFRGHFLIEGKFDTRNNDVQRLFQEFLAVYDNTFENSSLQEQNVQVEEILTDKISKSAKKDRVLKLFPNEKSNGRFAEFLKLIVGNQADFKKHFELEEKAPLQFSKDTYEEELEVLLAQIGDNYAELFLSAKKLYDSILLSGILTVTDVSTKAPLSASMIQRYNEHQMDLAQLKQFIRQKLSDKYNEVFSDVSKDGYAGYIDGKTNQEAFYKYLKGLLNKIEGSGYFLDKIEREDFLRKQRTFDNGSIPHQIHLQEMRAIIRRQAEFYPFLADNQDRIEKILTFRIPYYVGPLARGKSDFAWLSRKSADKITPWNFDEIVDKESSAEAFINRMTNYDLYLPNQKVLPKHSLLYEKFTVYNELTKVKYKTEQGKTAFFDANMKQEIFDGVFKVYRKVTKDKLMDFLEKEFDEFRIVDLTGLDKENKAFNASYGTYHDLRKILDKDFLDNSKNEKILEDIVLTLTLFEDREMIRKRLENYSDLLTKEQVKKLERRHYTGWGRLSAELIHGIRNKESRKTILDYLIDDGNSNRNFMQLINDDALSFKEEIAKAQVIGETDNLNQVVSDIAGSPAIKKGILQSLKIVDELVKIMGHQPENIVVEMARENQFTNQGRRNSQQRLKGLTDSIKEFGSQILKEHPVKHSQLQNDRLFLYYLQNGRDMYTGEELDIDYLSQYDIDHIIPQAFIKDNSIDNRVLTSSKENRGKSDDVPSKNVVRKMKSYWSKLLSAKLITQRKFDNLTKAERGGLTDDDKAGFIKRQLVETRQITKHVARILDERFHTETDENNKKIRQVKIVTLKSNLVSNFRKEFELYKVREINDYHHAHDAYLNAVIGKALLGVYPQLEPEFVYGDYPHFHGHKENKATAKKFFYSNIMNFFKKDDVRTDKNGEIIWKKDEHISNIKKVLSYPQVNIVKKVEEQTGGFSKESILPKGNSDKLIPRKTKKFYWDTKKYGGFDSPIVAYSILVIADIEKGKSKKLKTVKALVGVTIMEKMTFERDPVAFLERKGYRNVQEENIIKLPKYSLFKLENGRKRLLASARELQKGNEIVLPNHLGTLLYHAKNIHKVDEPKHLDYVDKHKDEFKELLDVVSNFSKKYTLAEGNLEKIKELYAQNNGEDLKELASSFINLLTFTAIGAPATFKFFDKNIDRKRYTSTTEILNATLIHQSITGLYETRIDLSKLGGD

SEQ ID NO: 139 - protein, 1024 aa, Helicobacter mustelae
MIRTLGIDIGIASIGWAVIEGEYTDKGLENKEIVASGVRVFTKAENPKNKESLALPRTLARSARRRNARKKGRIQQVKHYLSKALGLDLECFVQGEKLATLFQTSKDFLSPWELRERALYRVLDKEELARVILHIAKRRGYDDITYGVEDNDSGKIKKAIAENSKRIKEEQCKTIGEMMYKLYFQKSLNVRNKKESYNRCVGRSELREELKTIFQIQQELKSPWVNEELIYKLLGNPDAQSKQEREGLIFYQRPLKGFGDKIGKCSHIKKGENSPYRACKHAPSAEEFVALTKSINFLKNLTNRHGLCFSQEDMCVYLGKILQEAQKNEKGLTYSKLKLLLDLPSDFEFLGLDYSGKNPEKAVFLSLPSTFKLNKITQDRKTQDKIANILGANKDWEAILKELESLQLSKEQIQTIKDAKLNFSKHINLSLEALYHLLPLMREGKRYDEGVEILQERGIFSKPQPKNRQLLPPLSELAKEESYFDIPNPVLRRALSEFRKVVNALLEKYGGFHYFHIELTRDVCKAKSARMQLEKINKKNKSENDAASQLLEVLGLPNTYNNRLKCKLWKQQEEYCLYSGEKITIDHLKDQRALQIDHAFPLSRSLDDSQSNKVLCLTSSNQEKSNKTPYEWLGSDEKKWDMYVGRVYSSNFSPSKKRKLTQKNFKERNEEDFLARNLVDTGYIGRVTKEYIKHSLSFLPLPDGKKEHIRIISGSMTSTMRSFWGVQEKNRDHHLHHAQDAIIIACIEPSMIQKYTTYLKDKETHRLKSHQKAQILREGDHKLSLRWPMSNFKDKIQESIQNIIPSHHVSHKVTGELHQETVRTKEFYYQAFGGEEGVKKALKFGKIREINQGIVDNGAMVRVDIFKSKDKGKFYAVPIYTYDFAIGKLPNKAIVQGKKNGIIKDWLEMDENYEFCFSLFKNDCIKIQTKEMQEAVLAIYKSTNSAKATIELEHLSKYALKNEDEEKMFTDTDKEKNKTMTRESCGIQGLKVFQKVKLSVLGEVLEHKPRNRQNIALKTTPKHV

SEQ ID NO: 140 - protein, 765 aa, Butyrivibrio fibrisolvens
MGITIGLDLGVASVGWAVVNDDYEILESCSNIFPSADASKNSERRGFRQGRRLTRRRKNRIHDFQKLWEDKGFVIPSQGTEDVLAIKIKGLSEKLSVDEVYWVLLNSLKHRGISYLDDADSGDNSSDYAKSISRNEEELKEKLPCEIQWERLQKYGAYRGNISIVEDGEPITLRNVFTTSAYKKEVEQFIDTQAKYNAQYSGDFKADYLEIFNRKREYYEGPGNELSRTDYGKYTTEINADGEYITVDNIFDKLVGKCSVNPDERRAAGASYTAQEFNVLNDLNNLTISSESSFIEDGKLTEDAKRKIIETIKNAKTVNVKKIICDVIGDKKCQISGARIDKNEKEIFHSFEAYNKMRRALEEIGFDISSLSRENLDLIGDILTLNTDRESILNAFNRKGIELADEAKDILVKVRKTNGSLFNKWQSFGLSIMNELIPELYAQPKNQMELLTAMGVFKSRGDRFLECKEIPGDLIVDDIYNPVVSKTVRITVRILNALIKKYGYPDRVVIEMPRDKNSDEEQQRLKKEQRDNENEIKDIKARVKTEYGREITEEDFRQHSKLSLKLKLWNEQQGICPYSGKSIKIDDLLDNPNLFEVDHIIPLSISFDDSRNNKVLVYSSENQDKGNRTPLAYLASVNRQWDIHSFMDYVLKTYAGAQKRKKRDNLLNEQDITKVEVLQGFVNRNINDTRYASKVVLNSLQEYFSSKECSTKVKVIRGSFTHQMRVNLKLKKTVMNHMFIMQLMQCLLLFHRWDMTLIMNLQISI

SEQ ID NO: 141 - protein, 1338 aa, Coprococcus catus
MKQEYFLGLDMGTGSLGWAVTDSTYQVMRKHGKALWGTRLFESASTAEERRMFRTARRRLDRRNWRIQVLQEIFSEEISKVDPGFFLRMKESKYYPEDKRDAEGNCPELPYALFVDDNYTDKNYHKDYPTIYHLRKMLMETTEIPDIRLVYLVLHHMMKHRGHFLLSGDISQIKEFKSTFEQLIQNIQDEELEWHISLDDAAIQFVEHVLKDRNLTRSTKKSRLIKQLNAKSACEKAILNLLSGGTVKLSDIFNNKELDESERPKVSFADSGYDDYIGIVEAELAEQYYIIASAKAVYDWSVLVEILGNSVSISEAKIKVYQKHQADLKTLKKIVRQYMTKEDYKRVFVDTEEKLNNYSAYIGMTKKNGKKVDLKSKQCTQADFYDFLKKNVIKVIDHKEITQEIESEIEKENFLPKQVTKDNGVIPYQVHDYELKKILDNLGTRMPFIKENAEKIQQLFEFRIPYYVGPLNRVDDGKDGKFTWSVRKSDARIYPWNFTEVIDVEASAEKFIRRMTNKCTYLVGEDVLPKDSLVYSKFMVLNELNNLRLNGEKISVELKQRIYEELFCKYRKVTRKKLERYLVIEGIAKKGVEITGIDGDFKASLTAYHDFKERLTDVQLSQRAKEAIVLNVVLFGDDKKLLKQRLSKMYPNLTTGQLKGICSLSYQGWGRLSKTFLEEITVPAPGTGEVWNIMTALWQTNDNLMQLLSRNYGFTNEVEEFNTLKKETDLSYKTVDELYVSPAVKRQIWQTLKVVKEIQKVMGNAPKRVFVEMAREKQEGKRSDSRKKQLVELYRACKNEERDWITELNAQSDQQLRSDKLFLYYIQKGRCMYSGETIQLDELWDNTKYDIDHIYPQSKTMDDSLNNRVLVKKNYNAIKSDTYPLSLDIQKKMMSFWKMLQQQGFITKEKYVRLVRSDELSADELAGFIERQIVETRQSTKAVATILKEALPDTEIVYVKAGNVSNFRQTYELLKVREMNDLHHAKDAYLNIVVGNAYFVKFTKNAAWFIRNNPGRSYNLKRMFEFDIERSGEIAWKAGNKGSIVTVKKVMQKNNILVTRKAYEVKGGLFDQQIMKKGKGQVPIKGNDERLADIEKYGGYNKAAGTYFMLVKSLDKKGKEIRTIEFVPLYLKNQIEINHESAIQYLAQERGLNSPEILLSKIKIDTLFKVDGFKMWLSGRTGNQLIFKGANQLILSHQEAAILKGVVKYVNRKNENKDAKLSERDGMTEEKLLQLYDTFLDKLSNTVYSIRLSAQIKTLTEKRAKFIGLSNEDQCIVLNEILHMFQCQSGSANLKLIGGPGSAGILVMNNNITACKQISVINQSPTGIYEKEIDLIKL

SEQ ID NO: 142 - protein, 1035 aa, Candidatus Puniceispirillum
MRRLGLDLGTNSIGWCLLDLGDDGEPVSIFRTGARIFSDGRDPKSLGSLKATRREARLTRRRRDRFIQRQKNLINALVKYGLMPADEIQRQALAYKDPYPIRKKALDEAIDPYEMGRAIFHINQRRGFKSNRKSADNEAGVVKQSIADLEMKLGEAGARTIGEFLADRQATNDTVRARRLSGTNALYEFYPDRYMLEQEFDTLWAKQAAFNPSLYIEAARERLKEIVFFQRKLKPQEVGRCIFLSDEDRISKALPSFQRFRIYQELSNLAWIDHDGVAHRITASLALRDHLFDELEHKKKLTFKAMRAILRKQGVVDYPVGFNLESDNRDHLIGNLTSCIMRDAKKMIGSAWDRLDEEEQDSFILMLQDDQKGDDEVRSILTQQYGLSDDVAEDCLDVRLPDGHGSLSKKAIDRILPVLRDQGLIYYDAVKEAGLGEANLYDPYAALSDKLDYYGKALAGHVMGASGKFEDSDEKRYGTISNPTVHIALNQVRAVVNELIRLHGKPDEVVIEIGRDLPMGADGKRELERFQKEGRAKNERARDELKKLGHIDSRESRQKFQLWEQLAKEPVDRCCPFTGKMMSISDLFSDKVEIEHLLPFSLTLDDSMANKTVCFRQANRDKGNRAPFDAFGNSPAGYDWQEILGRSQNLPYAKRWRFLPDAMKRFEADGGFLERQLNDTRYISRYTTEYISTIIPKNKIWVVTGRLTSLLRGFWGLNSILRGHNTDDGTPAKKSRDDHRHHAIDAIVVGMTSRGLLQKVSKAARRSEDLDLTRLFEGRIDPWDGFRDEVKKHIDAIIVSHRPRKKSQGALHNDTAYGIVEHAENGASTVVHRVPITSLGKQSDIEKVRDPLIKSALLNETAGLSGKSFENAVQKWCADNSIKSLRIVETVSIIPITDKEGVAYKGYKGDGNAYMDIYQDPTSSKWKGEIVSRFDANQKGFIPSWQSQFPTARLIMRLRINDLLKLQDGEIEEIYRVQRLSGSKILMAPHTEANVDARDRDKNDTFKLTSKSPGKLQSASARKVHISPTGLIREG

SEQ ID NO: 143 - protein, 1270 aa, Mycoplasma gallisepticum
MNNSIKSKPEVTIGLDLGVGSVGWAIVDNETNIIHHLGSRLFSQAKTAEDRRSFRGVRRLIRRRKYKLKRFVNLIWKYNSYFGFKNKEDILNNYQEQQKLHNTVLNLKLEALNAKIDPKALSWILHDYLKNRGHFYEDNRDFNVYPTEELANYFDEFGYYKGIIDSKNDDDDKLEEGLTKYKFSNQHWLEEVKKVLSNQTGLPEKFKEEYESLFSYVRNYSEGPGSINSVSPYGIYHLDEKEGKVVQKYNNIWDKTIGKCSIFPDEYRAPKNSPIAMIFNEINELSTIRSYSIYLTGWFINQEFKKAYLNKLLDLLIKTNSEKPIDARQFKKLREETIAESIGKETLKDVESEEKLEKDDHKWKLKGLKLNTNGKIQYNDLSSLAKFVHKLKQHLKLDFLLEDQYTPLDKINFLQSLYVYLGKHLRYSNRVDSANLKEFSDSSRLFERVLQEQKDGLFKLFEQTDKDDEKILTQTHSLSTKAMLLAITRMTNLDNDEDNQKNNDKGWNFEAIKNFDQKFIDITKTNNNLSLKQDKRYLDDQFINDAILSPGVKRILREATKVFNAILKQFSEEYDVTKVVIELARELSEEKELENTKNYKKLIKKNGDKISEGLKALGIAEDKIEEILKSPTKSYKVLLWLQQDHIDPYSQKEIAFDDILTKTEKTEIDHIIPYSISFDDSSSNKLLVLAESNQAKSNQTPYEFINSGKAEITWEVYEAYCHKFKNGDSSLLDSTQRSKKFAKMMKTDTSSKYDIGFLARNLNDTRYATIVFRDALKDYANNHLVEDKPMFKVVCINGGVTSFLRKNFDPKSWYAKKDRDKNIHHAVDASIISIFSNETKTLFNQLTKFADYKLFKNTDGSWKKIDPKTGVVSEVTDENWKQIRVRNQVSEIAKVIDKYIQDSNIERKARYSRKIENKTNISLFNDTVYSAKKVGYEDQIKRKNLKTLDIHESAEENKNSKVKKQFVYRKLVNVSLLNNDKLADLFAEKEDILMYRANPWVINLAEQIFNEYTENKKIKSQNVFEKYMLDLTKEFPEKFSEAFVKSMIRNKTAIIYNVEKDVVHRIKRLKILSSELKENKWSNVIIRSKNESGTKLSYQDTINSIALMIMRSIDPTAKKQYIRVPLNTLNLHLGDQDFDLHNIDAYLKKPKFVKYLKANEIGDEYKPWRVLTSGTLLIHKKDKKLMYISSFQNLNDLIEIKNLIETEYKENVDSDPKKKKKASQILRSLSVILNDYILLDAKYNFDILGLSKNKIDEILNSKLDLDKIAK

SEQ ID NO: 144 - protein, 1204 aa, Prevotella ruminicola
MERILGIDTGTNSLGWAIVDKDENQYHLVAKGTNIFSEGVKIEKGIESSKAAERTEHRSVRKHYWRRKIRKIRLLTILSDNDLCPRLKHEQLRQWRLKKVYPTDDTFMEWQRTEDKAQVNPYKFRYICLTQKLDLSDITQRFILGRALYHLNQRRGFLSNRKEATKESEGTVKEGISSLSKDMKDSGCEYLGEYFYQLYQQGKKIRNHYTARKEHYLKEFKAICSKQELDDALIEKLEKAIFDQRPLKSQKGQVGTCTFEKGKSRCPSSHPLYEDFRMYSFINNIKVQVDTLYDKGERSLTDEEKQLIIPLFKRKSKRTFPFEDIAKKIAGKNNYCYIKSNEEKAYKFNYQMDTQVSGSPVNAQLEEIFGEDWLSSVCEVYTLANNKSRFQIMNDVWHVLFFYDDEDKLKEFAKDRLQLDDELAEKFSKISIPNDYAALSLKAIRKIMPYLRDYGLIYSEAVFLANLVDVLPQHVWGIKEMREAAIENVIDVMHSYDKNNIDGITLEGCVKTFLKERYQVSDDNLKKLYHPSMLDPYPRQRPNDEGVFQLGSPRISSVKNPMAMHSLFRLRKVVNLMLKKGYITPDTKVHIEFSRDLNDANKRWAIQTWQRENEKERERCRKEIEKYIASPSDTDILKYQLWEEQNHKCLYTGDEIRITDFLGDNPKYDIEHTIPRSAGGDSTKMNLTLCSSRFNRDEKKTKLPAELVNHDEILERISNWKEKYEDIDKQIRKISTKGATSKEDKDSKIRRRHYLILQRDYWRGKYQRFTMTEVPEGFSRRQGTDISVISRYARMYLKSVFKQVYIVKGIATSDFRKMWGIQDEYAKKERVNHVHHCIDAITIACIGKAEYDKLADYRHQYDDYLFQGKTKPTFDKPWPSFVIDIKHIQDELLIAHYAKDNLEKFTKKNLRGKDGRIIRDKFGNKLQMKGDTSRNSLHNDKFYGAINHEGEIKYVYRTNIEALDAKSIGNIVDPTVRSIIESAIAIHGSLKAAINKGIWMNEEKHIPIKKVRVFRNDVKKPIELKDQRDLSDKDYKQHYYVTNDGNYMMLIFSKLNNKGREIRQHVVINSLEATEVIKSHKRSQVGKVVWESYYSKEGFDLIYKLKSGTMILLYENNRDEVWDLDIRNLQKRLYIITKMKYDGRIYMMHHQEAREKKDLEEKSGSFKINEDYRPLIVNSYNQFNALVQDLDFEINDLGEIRRLI

SEQ ID NO: 145 - protein, 1178 aa, Scardovia inopinata
MGKRHNSNMAKKKISYRIGIDVGLNSTGLAAIEVDDDGAPIRILNTMSVIHDGGVDPDAAKVRGTRLAISGIARRTRRMRRRRAKRLDRLEQILEKYGYTDTEPVLEEPYGPWICRAELADGFINDDEQRRMMIGIAIRHIARHRGWRNPYQNVRALLNIDDSDLSEEYKNLKEKVQDQINDGKDLPNFTPSQLVRDYLDNFSGQPAARIRTGKAGPRGNRRDAVGILPQRMRQSDYAYELQRIFDMQKIGRDEAQELLMAVFEAKSPKGSAEKRIGKDPLTGKKRALKASLAFQKYRIVATITNLRIKTGTGSERMLSPTELNDIYTYLLRVQDDNHLPTWEDICEEVLHIGRYQLAGIGKTFEGGERISNMPPVIQTSLAIHGLSEGTLAEKLTKWWDKADDDSRESMIKLLSNTVDIDRVNEVDENFASALDFIDSLDDEELTKLDKIALPRGRAAYSEEALNKLTADMLNTGDDLFSARQRIYHVNNSWRPPQPPIGEPLGNPAVDRVLKITNRYLMNCLNRWGQPRRVTIEHTRSGFTSVKQATEHQKISDKRAEYRRDIVKQLEEAGVESVHEYDIRRWEAVQRQNGQCLYCGRDITFKTCEMDHIVPRKGPGSTNTRTNFAAVCPECNRMKSNIPFASWAETKEAKDRGVSLDKAIKQVRFFNFTKNEYSPQAQRNFKKSMIERLKQKTSDEPLDNRSIESVSWMADELYKRIDWYFNHEQYETSKKAINDDKDNLSGTQVVVYPGSITAEARNAAGLGGNIHFIGGRYKTRLDRRHHAVDACVIAMMEPGIARILTERNQLRQAQRLTARIEDDEVNWKDYPTENTAGYNKYQAWSDRMHALLEYMNNALDYDKIPVVRWERLQLGNRSAHEDTIHPLKKLPLSHEISAIDINHASTPALYEALVSLPDFSEQDGLPADPSRQINVNGERYSGDDLVSFFNSNAAQIAIQGGSAELGTAFHHARIYRCWTVGKNGKKKIFFGMIRVYQHDLLHAKNEDLFTYPLKRSSVSMRYAKKEVVHAILSGNAEYVGYLCVGDELVLDLKGDKSNDEGGSRLSGQVGEFVQKFEEDSKVNSQIVNRWTVDGFPDEAKLRLRPSMFAGEGLKNMKSELVENAAIKNILSKTGWRVSVDVISKKSPVVLRRNAFGEPRWKTNAGLPVSYRWQDTETKE

SEQ ID NO: 146 - protein, 1371 aa, Gordonibacter pamelaeae
MNLRNVESYQVGLDIGTGSVGWAVLDDNGDLCRFKGKPTWGSRVFPTAETAAEARVHRGQRRRYDRRRQRIDLLQRFFADEVAKVDPEFFIRLNQARLHPENRDPAHADYRWPLFNGSNFTEKDYYRQFPTIYHLRAHLLKSDEPADIRLVYLALHNIVKHRGNFLHQDNPSLSARNANVGDAVEALCLALDEWCGAHDVECACDEAALAEALGDASLRPGEKRERAEAALGVEKAHKKLAKAVSSAVVGYAAEFGHVFFAESEGSKFALSNDEKVEAYVCPDEGRDLFDAMRAVHSSYVLMGILSEAQGELLSVCKVGEYERYKRDLETLKSLVRAYGPERYDEFFCGPFYEGTRDYDPGKAQGYTKYNLGASKLSHEDFLKEVQKLLKDIGAQADERYADIERAIEAGAFLRRLKTSDNGTIPYQLHLEEMDAIIERQAAFYPFLAQEKDKLKSLVSFRIPYYVGPLTQKNAARDGKGEARFAWSSRKPGMEDARVYPWNWEDVIDKDQSAEDFIRRMTGTCTYLKGEPVLARCSLDYELFCVLNELAGARWTQDGDKSYRFDAADRLGIVEDLFKKRKRVTYEAAEKWLARTHGPESGKSAGGAYHVSGGQGEDAFESQLSSHYDFCKILGVDELSDADEAMAEDIILWNTVFEDRSILKRKIKLAYGDRLGDAQVRKLCQKRYTGWGRLSGELLRGLRSATDNGPKTIMDILLEGDPNHARRMGAAMNLMEILHDDLLEFQAKIDEHNRERALAVGGMSVDEVTGSPALRRGINQALRVVDEIAGIAGKPPAHIYVEVTRDEGARNKGRRTTSRYRALEAALSSIKAQCADVYAELKERDPRALDDERLTLYFMQCGKCMYSGDALDINKLQTYQVDHILPQSYVKDDSFENKVLVRPDTNQRKGDTLLLDERLIARMRGFWRTLRDAELIGEKKFNNLTRTSVSDEQMKKFVSRQLVETGQMVKQVQQLLQARYPESEVQPVKAGVSHQLRVGCALAKSREINDFHHAHDAYLACQVGRFVQYRHSAVYSEPVKMAAVVKQFIKKQAEDYRRTRELPGSDGFIVSSFMTPGFDVKTGEVFRDAWDAGAEIDRIRRCFDYKDCFISRMPEETHGAFWDATIYSPRAAGKTLSLPLKRGLDPRKYGSYSREQFAYFFVYEAVKPKKKQRVLEFAPVPVRVASALANDPDALEDYARELAEAEGLVFERIRRRKVYKYQQIIVGDSRLYVTGREEVRNARQLAFSQDETKLICRIEQGEECEEGELLDLFRSMQRKYLACAPRLARLMKVAEMEEGFIAATASGKREVLLSLTSIAAAHRNSIDLKPIGRKGSSGQMKITFSKELSTNGILFVDSSVTGMFERRCRLGL

SEQ ID NO: 147 - protein, 1388 aa, Zunongwangia profunda
MKRILGLDLGTNSIGWALVNEAENEKEISKIIKLGVRVNPLTIDEKTNFEKGRPLSTNADRTLKRGARRNLQRYKLRRENLIEILIDNHIITKETPLTEIGKGTTYQTLSLRAKAVRERIDLEDFAKVLLAINKKRGYKSSRKASNDEEGQAIDGMAIAKELYERGITPGQYVLELLENDRKYIPDFYRSDLKQEFNKIWNNQKTFYPEILTDELFKELDGKNKSQTWAICQKPFNIKGIKRITKGREKTIENYHWRVKGLSGKLNLEKLAIILQEINNDINQSSGYLGGISDKSKKLYLNKETVGEFLYKQIAKNPHTSLKNQVFYRHDYLDEFEQIWKTQSNFNANLTDELKQEIRDVIIFYQRKIKSQKSLISFCQFESWEQEYFDKETGKTKTRTVGRRVIPKSSPLFQEFKIWQNLNHLVFTNSETDEKIEIKEVEQEIRKELFEELNLRGDLNPNDLLKILRSQFKIGKLSNWKCNFEKIEGNRTNAALFNIYQKISDFEGYGIDWNKSNAKKIRKELKATFPEIGIDASILEFDAYKKQLTNQSSYELWHLLYSAEEDFKISEQDKLIYGNSSVSLKKKLHLKFGFNPEYAKMLANLSLMSDYGNLSAKAIKKILPYLEDGHLYSEACRLAGYNHSKSLTAEELEKFEPKAKLDLLKKNSLRNPVVEKILNQMVNVVNQVIDTYGKPDGVRIELARELKKSAKERAEMTKGIADGTRRNEEIKKIITQKFGIPNPTKSDLVRYRLWQELESRGYKDIFTDKYISPDKIFSSEIDIEHIIPKALLFDDSFSNKTLSFRNVNLKKANRTALDFITQDYQSNVEAYKERVETWNKDNHISKGKRNKLLMSLKDIPDGFIERDLRNSQYIARKAKRMLYEVFPNEVLATSGSITDKLRSDWDLINVMKELNLPKYKALGLTEYEERLDKGTEELFKHEVIKDWTKRNDHRHHAMDALAVAFTTHNHIQYINNLNARKDITQDNHPIIKNIENLITEVNSKGKRVFKAPMSSFRESAKEQIEAILVSFKNKNKVVTKNINQTKKEGGFNYQNAKTPRGQLHKETIYGKSKQPLEKPVKINNRFCKKQVGLIINFKEQEAVLHHLKKYDNNEKIAFSNKTLKSDPIQVNGSPLREVKIFEEIFTIRKDINPDNFKTQKHLDKIIDKGIKEVMKKRLEEYNGDFKTAFSDLDKNPIWLNQSKGITIKRATISGVTNAEPLHQAKDHLGNIILDDNGKEIPIDYVSTGNNHHVAIYQDESGNLQEEVVSFYEAVIRKNQDQPIIKKRHPKGWKFLFTMKQNEMFVFSSENFNPSEIDLLDEKNAAIISPNLFRVQKIATKNYMFRHHLETEVTNNLDFTYRHFQATEWLRNLCKVRIDHIGRIVQIGEY

SEQ ID NO: 148 - protein, 1082 aa, Methylosinus trichosporium
MRVLGLDAGIASLGWALIEIEESNRGELSQGTIIGAGTWMFDAPEEKTQAGAKLKSEQRRTFRGQRRVVRRRRQRMNEVRRILHSHGLLPSSDRDALKQPGLDPWRIRAEALDRLLGPVELAVALGHIARHRGFKSNSKGAKTNDPADDTSKMKRAVNETREKLARFGSAAKMLVEDESFVLRQTPTKNGASEIVRRFRNREGDYSRSLLRDDLAAEMRALFTAQARFQSAIATADLQTAFTKAAFFQRPLQDSEKLVGPCPFEVDEKRAPKRGYSFELFRFLSRLNHVTLRDGKQERTLTRDELALAAADFGAAAKVSFTALRKKLKLPETTVFVGVKADEESKLDVVARSGKAAEGTARLRSVIVDALGELAWGALLCSPEKLDKIAEVISFRSDIGRISEGLAQAGCNAPLVDALTAAASDGRFDPFTGAGHISSKAARNILSGLRQGMTYDKACCAADYDHTASRERGAFDVGGHGREALKRILQEERISRELVGSPTARKALIESIKQVKAIVERYGVPDRIHVELARDVGKSIEEREEITRGIEKRNRQKDKLRGLFEKEVGRPPQDGARGKEELLRFELWSEQMGRCLYTDDYISPSQLVATDDAVQVDHILPWSRFADDSYANKTLCMAKANQDKKGRTPYEWFKAEKTDTEWDAFIVRVEALADMKGFKKRNYKLRNAEEAAAKFRNRNLNDTRWACRLLAEALKQLYPKGEKDKDGKERRRVFSRPGALTDRLRRAWGLQWMKKSTKGDRIPDDRHHALDAIVIAATTESLLQRATREVQEIEDKGLHYDLVKNVTPPWPGFREQAVEAVEKVFVARAERRRARGKAHDATIRHIAVREGEQRVYERRKVAELKLADLDRVKDAERNARLIEKLRNWIEAGSPKDDPPLSPKGDPIFKVRLVTKSKVNIALDTGNPKRPGTVDRGEMARVDVFRKASKKGKYEYYLVPIYPHDIATMKTPPIRAVQAYKPEDEWPEMDSSYEFCWSLVPMTYLQVISSKGEIFEGYYRGMNRSVGAIQLSAHSNSSDVVQGIGARTLTEFKKFNVDRFGRKHEVERELRTWRGETWRGKAYI

SEQ ID NO: 149 - protein, 1186 aa, Gardnerella vaginalis
MEGNISYAIGIDVGLNSVGLAAIRLDNNGEPIRILKAMSVIHDAGIDPNGAKESDTRKAISGVARRVRRLYRQRRRRLQKLDFLLHSLGFPVVENKDLDFSDSFTPWIFRAKLADEYIADEKQRKQMLSVAIRHIARHRGWRNPYQSIKSMTQETEYSEFYNELLKNIEKFAPGVSCEGSTPAQLVRDYLLSQQGKASRRLRITTDDRRKNHPNSLDPVLPRKLMQSDNMLEILNIFNVQHIDNKYVREQIINAVFYAKSPRGSAENRVGKDAITGKGKRALKASLAFQKYRIISTISNLRIRENSKERCLTIEEKQSVYKLLTTSTDEYSKEKSAEAPLYTWIDVADCLGIERYKLRGVGSQIEDGESVGNRPPMLNSELAILYANAKSLKQSLITWWLAANRTQEDKEAFIEILSNTVDIEAIHDNPEYQDKYGSVIAFIDSMDETEIAALENISLPNGRAAYSLETLDKLNKQMLETDDDLFEARKKLFNLPNNWRPSEAPIAEPTGNPSVDRVLKIVHRFLISAKNRWGNPERINIEHVRSGFQSKKMANSYKKLLDKRTEGKENLKAMMRNSLHLGTSDSISDADIRRYEAVQRQNGQCLYCGSEITYHTCELDHIVPRKGPGSTNTRENLVATCSSCNAQKCNTPFATWCEESTYCKNHDISVDSAINRVRAFIFPPNSYDKRGASQFKKEVIARLKQKVGDEAFDNRSIESVAWMANELHRRIDWYYNSQNYQTNNGISDITNKAQTNVGVYAGSLTAIARRMSGIDGKLEFFDGRRKTRFDRRHHAVDASVIAMMTPGIAQILAIKCNLRETQLLQGNKVVPGGIDWKEYPTANDQGYQQYANWSVRMNALLELLNEEMRADRIAVVNSIRLRYSNSSVHKDDVHALLKLHVGDEIDSETIRRASTPALYCALTRNPDYDVNNGLPENTDRTILLHDKKLNADDSITFFKSKAAQLFVREGSVEIGNSIHHLRIYEYFEKLKSGKVKKSYGMIRVFQDDLHRYIHEDLFSCDLPEQSISMRYADTKVAHAVQTGNANYLGYLVPGDEIIVDFSHVKLSGYIGEFVEFLNKIGANCAAYKHWVVAGTDDKTTLILKPSMISSEGIDKLYSNCERNNFDYASYEKSIDKILVDKGWRVSVNVLDQYKAATIRRNALGEPRWASRSHLPISWSWDTGENRE

SEQ ID NO: 150 - protein, 1434 aa, Bacteroidetes oral
MKNILGLDLGTNSIGWAYVKQAQNDSEKSEIAELGVRVNPLTVDEKTNFEKGKPISTNADRTLKRGARRNLQRYKLRRQELIELLKDYQVISDKTILAEDGKETTFETLRLRVKSAKEQVSLEELARILLMINKKRGYKSSRKAKNEDEGQLIDGMEIARRLYDENLTTGQLSLQLLKEGKKSLPDYYRSDLQHELDKVWNFQKQFHPDILTDEFYTSIQGKGQKATRESFSSKYGIDTAENKGSREEKKLQAYQWRADATHKELTKEELAFVITEINNNINNSSGYLGAISDRSKELIFANETVGEYLWKQIQNDPHTSLKNQVFYRQDYFDEFERIWETQSGFYPQILTESLKNELRDILIFYQRKLKSQKALVSICEFESKEIPLKDKQGNPISKNGIPVTKLVGPKVAPKSSPLFQEFKIWQNLNNVLVRPKGSRKRKVTTNQQSTLLEGQEPVFELNLEQKELLFEELNLKGNLKTDYCLELIGYSAKEWEMNYPTLEGNKTNKALYEAYLKIIDSEGYDAKKLLKVKTDKDDINLDDIKVSASEIKTMISDIFNELGINTKILDFDAELERKQFEAQASYRLWHLLYSYEGDDSKSGNELLYRLLEDKFGFKREHSKTLANVSLLSDYGNLSTKAIRTIYPYIKENKFSTACELAGYRHSKLSISKEENENRTLKDTLDVLKKNSLRQPVVEKILNQMINLINELIEKHSEKDEKGNIVKYFKFDEIHIELARELKKNAEERRELDSKVREGKDRNEKIITILKSEFGLPYPTKNDITRYRLYEELKDNGYKDLYTNTYIPREKLFSKEIDIEHIIPKSRLFNDSFSNKTICYRQDNLNKGERTAYDYIEGLGKTQLDEYLNRVENLYTNKFITKAKYRNLLKKESEIGDGFIERDLRETQYIAKKAKEMLLQITRHVVSTTGSITDRLRDDWELVNVMRELNLPKYKVLGLTEIQERKNGQTVEVITDWTKRNDHRHHAMDALTVAFTKHSHIQYLNFLNARKDEKHKEYSNIMGIQQLETEKTTDKDGKDRRVFKTPIPNFRQVAKEHLESILISHKTKNKVVTRATNKIAGSKKQQETLSPRGQLHKETVYGKYRRYVQKEEKIGSKFDLQTIERVANPLYKRLLTKRLEENGGDPKKAFTGKNALAKSPIYLDETQTQQLPEKVKLVWLETDFSIRKDITPDNFKDEKSIDKVLDEGIKRILKDRLKSFDGDAKRAFTDLEQNPIWLNKEKGIAIKRVTISGVSNAEPLHTKKDHLGNEIFDDTGKPIPVDYVSTGNNHHIAIYRDENGNLQEKAVSFFEAVTRANQGLPTVDKTYNQHLGWQFLFTMKQNEMFVFPNKETGFDPQEIDLLDPKNKKLISPNLFRVQKISTKNYFFRHHLETSVETHNALNGVTYKSQLGLNGITDIIKVRINHLGDIVHIGEY

SEQ ID NO: 151 - protein, 1341 aa, Peptoniphilus sp.
MWGSRLFEEASTAQDRREHRSNRRRLERRKYRLDLLEELFVEEINKIDPEFFIRLRESKFHFEDRSLKNTFILFNDKMEGGYNDKVFFSKYPTIYHLRSALINGNKEDVRAVFLAIHNILKNRGHFLLAGNDINISLSLNDTLTDLFEYLKIHLGIEVEFENKLKDIEKIALDKNLSKSDKQKKIVQLLETDYKKQLADVFKLSLGLTANMENIFGKENEQGLEFINAENKIKKIQFDSSYEENIAEFDQFYGEYFEIIDICKKIYDAISLSQILVDGKGLSESKVLSYEKHKEDLKLLKKVLKNIDKAYDNKGEDRLVYKVLKEDKDKGTNYVNYSKLSNNGTATTKEEFYKFLSKNLDLKKFGKLNKEDIETLDYINSEILLGRFLPLQKEKINGVIPYQLQMKELTQILNNASKYLPFLNKIEDGMTVKDKIISLIKFRIPYYVGPLNEYNRIENGNGFAWIEKKKNEKIFPWNFNDVVDIEKSAEKFINNLTNKCTYIKEETVLPKNSIIYSKFMVLNELNNLQYGNKKLDIELKMKMYTDLFLEKKDNRKVTEKRILEYFRINGINDGKEKLTGLNNEIHADMKSYRDMCEIMGENFNINVAENIINWITVFHGEKKILINKIKNVYGKMFNDEQISKLSKLNYSDWGRLSKKLLTDIKCYIDADGINFPVSILEAMEVSNKNLMELLSNKYEFISCIDDINNKYFGDRDISASELIDELYVSPAVKRGIWQSVRILEEIVSIIGHNPKKIFIEMTRHNEEKVQKSSRRHNLEELYKAIRKDPEYVELIKEFDSTTDTDSFKIKKLYLYFMQLGKCAYSKEKIDFDKLFTDSYDIDHIYPRSKTKDDSIHNNLVLVKAKYNREKTDVYPIDINIQKNMNSFWNFLYTKKFITEEKYKRLIRTSDLTDEELAKFISRQLVETSQSTKATAEVLKQIYGDSDICYVKAENVSDFRYGSSRQKDKNDIQKLFVKCREVNHFHHAKDAYLNIVVGNVYDVKFTKNPVNFIKKNKMGNKSNYSLNHMFCFDVERNGYKAWDSSETIKTVGRMMKSNDVRITKHVHPTRGELYDATIYKAKIAKTGSYMPLKSSKNTPLSDVTKYGGYTKIKIAYYSVYKYKFSDKNLIKTEIRLIPIPIYLSKNDDDIKEYVKNYLNDRVNSKLIDFTKIYDKLYVNSLIKINGYLYYLGGKTNDRVWIDNAVSIVLDDKIEYLIKRISNDIKYGYEINVSDDELMDIYESLAEKANKKIFYNRLSDFEKIFSNMDVKKKFVKLEKNDKCRVLLQLLNVLTDSQTTYKLEMVGLKHSRSNIGMKISNLEEFKVINSSITGLYSNEIDILNI

SEQ ID NO: 152 - protein, 1391 aa, Lactobacillus gasseri
MTKIKNEYIVGLDVGTNSCGWVAMDFQNTILRMHGKTAIGSHLFDAGNSAADRRAFRTTRRRIKRRKWRLKLLEEIFDPYMTEVDPYFFARLKESGLSPLDKRKNVSSIVFPTALEDKKFYCNYPTIYHLRYDLMSEDKKFDLREIYLAIHHIVKYRGNFLYNTPVKDFEASKIDVKDSLEKLNELYERLDSEFTVELDSSNALEIEKIIRDKKVFKINKVKSIHQLLSLKTENKERTKLIKDVSKQIINAILGYKTKFETILLKNISKDEADDWEFKLTDVDADNKFENLIGDLNENEQEILLEIRNLANAITLSNIVEEGKTLSESMIDKYNKHSDDLELLKQVISDHPDRDKAKKLALAYDLYVNNRHGKLLQAKDVLGSKKTLSKEDFYKEVKKNLDDSKASQEILDTIALDSFMPKQRTNENGVIPYQLHQLELDRIIKNQGKYYPFLKEVNPVSSHLKEAPYKLDELIRFRVPYYVGPLISPNESTKNKQTKKNQNFAWMIRKEQGQITPWNFDQKVDRMASANKFIKRMTTKDTYLLGEDVLPANSLLYQKFTVLNELNNIKINGKRISVPLKEELYNNLFKKNSTVTTNKLKSYLKENYNLINVEIKGLADEKKFNSGLTTYNKLRNLKIFDQQLDDLNYDKDFERIIEWSTIFEDKAIYKDKLKTIKWLSDRQIDKLSKIRMQGWGQLSKKLLSQLTDNNGQTIIEQLWDSQNNFMQIVNQSDFKDAIAVANQNLLVNTSVEDILNEAYTSPANKKAIRQVVKVVDDIVKAASGKVPKQIAIEFTRDADDKAKISQTRANKLRKVYKELSNELASETIRNELERVAKDQKLLKDKYYLYFMQLGRDAYTGEPINIDDLGQYDIDHILPQSFIKDDSLENRVLVKKAVNNGKSDNVPVKLYGNRMAADLGMTIRHMWEKWKDQGLITKTKYNNLIIDPDKINKYESSGFIHRQLVETSQIIKLVSTILQSKYPDTEIIVVKARYNHYLRKHLNLYKSREVNDYHHAIDAYLSAICGNLLYQVYPYLRPFFVYGQYKKFSSDPKKEKIIYDKTRKYNFISQIFENKSNDIISLETKKKVFDKKDIIEKLKHAYNYKYMLVSRETETHDQEMFKMTVYPRLSRDTKKSRNLISKKKDMPTEIYGGYTNNSDAYMVIARINKKKGTEYRVFGVPMRELVNLRKAEKNGRYNAYLKQVLEPEIMYSKNGKKNKTISSFEIVKAKVPYKQVILDGDKKFMLASSTYVQNAKQLTLSQNSMQAITDNCENDTEEEKALEEKALIEAYDEILTNIDKYLPLFDINKFREKLHAGREKFINLSLDVKKDTILQVLNGLHDNAVMPKIKSLGLSTPLGFMQFSSGVPLSENAKLIYQSPTGLFEKRVKISDL

SEQ ID NO: 153 - protein, 1426 aa, Sphingobacterium spiritivorum
MKHILGLDLGTNSIGWALIKQDFENKQGEILGMGSRIIPMSQDILGDFGKGNSVSQTAERTKYRSVRRLRERFLLRRERLHRILNVLGFLPEHYASQIDFTKRFGKFKEETEPKLVYSNEGFIFKKSFEEMLSDFKTHQPQLLEDNKKIPYDWTIYYLRKKALSRKIEKEELAWILLNFNQKRGYYQLRGEEEEENPNKLIEFYSLKIVDVLADEPQKGKSDIWYSLILENGWIYRRSSKTPLFDWKEKTRDFIVTIDLNDDGSVKTDKEGNEKRSFRAPGENDWTLVKKKTEQEIDSSRKTVGTYIYETLLKNPKQKIKGKLVRTIERKFYKTELKQILEKQKEFHPELRQDDLYSDCVRELYKNNEAHQLTLSKKDFVHLFMEDIIFYQRPLGSQKSSISNCTLEFRKYKDENGTEHTQYLKAIPKSNPYYQEFRIWQWMYNLNIYKKEDDTNVTKDFLNTKADFESLFEFLNNRKEVDQKALLKHFKLNDKTHRWNYVEDKKYPCNETKTMILSRLDKVENISDDFLTREMEQKIWHIIYSVNDKVEYEKALKSFAGKNNLEDNSFFEAFKKFPPFKSEYGAFSEKAIKKLLPLMRMGKFWNYNNISEQSKSRIQKIITGEYDENIKDKVREKAIHLTTETDFQGLQLWLVQYIVYGRHSEAAMLGKWNSADDLEEFLKEFKQHSLRNPIVEQVITETLRVVKDIWQKYGNGAKDFFREIHIELGREMKLPAEERERLTRQISENENTNFRIKALLAEMMDDNSVENVRPFSPMQQEILKIYEEGVLNSDIEIEDDILKISKTAQPSSSDLKRYKLWLEQKYKSPYTGQIIPLNKLFTPEYEIEHIIPQSRYFDDSFTNKIICESAVNKLKDNYIGLEFIKKLGGSIVECGNGKSVAILKHDAYEDFIKKHYANNRSKRNKLLLEDIPEKMIERQMNDTRYISKYISGVLSNIVRVEDGTDEGVNSKNIVPGNGKITTQLKQDWGLNDVWNDLILPRFERMNHLTNSTDFTAWNENHQKFLPTVPVEFSKGFSKKRIDHRHHALDALVIACATKDHVNLLNNQSAKSDTKRYDLKKKLMKFEKVAYNHPQTGERIEREAPKQFLKPWETFTIDAKNHLETIIVSFKQNLRVINKATNYYEKYVEKEGTKVKERVEQKGTNWAIRKPMHKETVSGKIDLPRIKVPKGKILTATRKSLDTSFNLKTIGSITDTGIQKILKNYLQYKDNNPELAFSPEGIEDMNKNIEKFNNGKAHQSISKVRVFELGSKFPLGQSGNKKEKYVEAAKGTNLFFAIYQDKNGKRSYETIPLNEVIERQKQGLSVVDLKGVDDFYLSPNDLVYVPSEDELENISMIDFNKMSSERIYKVVSFTGNQIFFVRQDIATSVVNKAEFSTLNKMERAIDGTMIKETCVKLQIDRLGNISKI

SEQ ID NO: 154 - protein, 1361 aa, Lactobacillus casei; identical to SEQ ID NO: 70

SEQ ID NO: 155 - protein, 1436 aa, Bacteroides fragilis
MKRILGLDLGTNSIGWALVNEAENKDERSSIVKLGVRVNPLTVDELTNFEKGKSITTNADRTLKRGMRRNLQRYKLRRETLTEVLKEHKLITEDTILSENGNRTTFETYRLRAKAVTEEISLEEFARVLLMINKKRGYKSSRKAKGVEEGTLIDGMDIARELYNNNLTPGELCLQLLDAGKKFLPDFYRSDLQNELDRIWEKQKEYYPEILTDVLKEELRGKKRDAVWAICAKYFVWKENYTEWNKEKGKTEQQEREHKLEGIYSKRKRDEAKRENLQWRVNGLKEKLSLEQLVIVFQEMNTQINNSSGYLGAISDRSKELYFNKQTVGQYQMEMLDKNPNASLRNMVFYRQDYLDEFNMLWEKQAVYHKELTEELKKEIRDIIIFYQRRLKSQKGLIGFCEFESRQIEVDIDGKKKIKTVGNRVISRSSPLFQEFKIWQILNNIEVTVVGKKRKRRKLKENYSALFEELNDAEQLELNGSRRLCQEEKELLAQELFIRDKMTKSEVLKLLFDNPQELDLNFKTIDGNKTGYALFQAYSKMIEMSGHEPVDFKKPVEKVVEYIKAVFDLLNWNTDILGFNSNEELDNQSYYKLWHLLYSFEGDNTPTGNGRLIQKMTELYGFEKEYATILANVSFQDDYGSLSAKAIHKILPHLKEGNRYDVACVYAGYRHSESSLTREEIANKVLKDRLMLLPKNSLHNPVVEKILNQMVNVINVIIDIYGKPDEIRVELARELKKNAKEREELTKSIAQTTKAHEEYKTLLQTEFGLTNVSRTDILRYKLYKELESCGYKTLYSNTYISREKLFSKEFDIEHIIPQARLFDDSFSNKTLEARSVNIEKGNKTAYDFVKEKFGESGADNSLEHYLNNIEDLFKSGKISKTKYNKLKMAEQDIPDGFIERDLRNTQYIAKKALSMLNEISHRVVATSGSVTDKLREDWQLIDVMKELNWEKYKALGLVEYFEDRDGRQIGRIKDWTKRNDHRHHAMDALTVAFTKDVFIQYFNNKNASLDPNANEHAIKNKYFQNGRAIAPMPLREFRAEAKKHLENTLISIKAKNKVITGNINKTRKKGGVNKNMQQTPRGQLHLETIYGSGKQYLTKEEKVNASFDMRKIGTVSKLAYRDALLKRLYENDNDPKKAFAGKNSLDKQPIWLDKEQMRKVPEKVKIVTLEAIYTIRKEISPDLKVDKVIDVGVRKILIDRLNEYGNDAKKAFSNLDENPIWLNKEKGISIKRVTISGISNAQSLHVKKDKDGKPILDENGRNIPVDFVNTGNNHHVAVYYRPVIDKRGQLVVDEAGNPKYELEEVVVSFFEAVTRANLGQPIIDKDYKTTEGWQFLFSMKQNEYFVFPNEKTGFNPKEIDLLDVENYGLISPNLFRVQKFSLKNYVFRHHLETTIKDTSSILRGITWIDFRSSKGLDTIVKVRVNHIGQIVSVGEY

SEQ ID NO: 156 - protein, 1517 aa, Bacteroides sp.
MKKIVGLDLGTNSIGWALINAYINKEHLYGIEACGSRIIPMDAAILGNFDKGNSISQTADRTSYRGIRRLRERHLLRRERLHRILDLLGFLPKHYSDSLNRYGKFLNDIECKLPWVKDETGSYKFIFQESFKEMLANFTEHHPILIANNKKVPYDWTIYYLRKKALTQKISKEELAWILLNFNQKRGYYQLRGEEEETPNKLVEYYSLKVEKVEDSGERKGKDTWYNVHLENGMIYRRTSNIPLDWEGKTKEFIVTTDLEADGSPKKDKEGNIKRSFRAPKDDDWTLIKKKTEADIDKIKMTVGAYIYDTLLQKPDQKIRGKLVRTIERKYYKNELYQILKTQSEFHEELRDKQLYIACLNELYPNNEPRRNSISTRDFCHLFIEDIIFYQRPLKSKKSLIDNCPYEENRYIDKESGEIKHASIKCIAKSHPLYQEFRLWQFIVNLRIYRKETDVDVTQELLPTEADYVTLFEWLNEKKEIDQKAFFKYPPFGFKKTTSNYRWNYVEDKPYPCNETHAQIIARLGKAHIPKAFLSKEKEETLWHILYSIEDKQEIEKALHSFANKNNLSEEFIEQFKNFPPFKKEYGSYSAKAIKKLLPLMRMGKYWSIENIDNGTRIRINKIIDGEYDENIRERVRQKAINLTDITHFRALPLWLACYLVYDRHSEVKDIVKWKTPKDIDLYLKSFKQHSLRNPIVEQVITETLRTVRDIWQQVGHIDEIHIELGREMKNPADKRARMSQQMIKNENTNLRIKALLTEFLNPEFGIENVRPYSPSQQDLLRIYEEGVLNSILELPEDIGIILGKFNQTDTLKRPTRSEILRYKLWLEQKYRSPYTGEMIPLSKLFTPAYEIEHIIPQSRYFDDSLSNKVICESEINKLKDRSLGYEFIKNHHGEKVELAFDKPVEVLSVEAYEKLVHESYSHNRSKMKKLLMEDIPDQFIERQLNDSRYISKVVKSLLSNIVREENEQEAISKNVIPCTGGITDRLKKDWGINDVWNKIVLPRFIRLNELTESTRFTSINTNNTMIPSMPLELQKGFNKKRIDHRHHAMDAIIIACANRNIVNYLNNVSASKNTKITRRDLQTLLCHKDKTDNNGNYKWVIDKPWETFTQDTLTALQKITVSFKQNLRVINKTTNHYQHYENGKKIVSNQSKGDSWAIRKSMHKETVHGEVNLRMIKTVSFNEALKKPQAIVEMDLKKKILAMLELGYDTKRIKNYFEENKDTWQDINPSKIKVYYFTKETKDRYFAVRKPIDTSFDKKKIKESITDTGIQQIMLRHLETKDNDPTLAFSPDGIDEMNRNILILNKGKKHQPIYKVRVYEKAEKFTVGQKGNKRTKFVEAAKGTNLFFAIYETEEIDKDTKKVIRKRSYSTIPLNVVIERQKQGLSSAPEDENGNLPKYILSPNDLVYVPTQEEINKGEVVMPIDRDRIYKMVDSSGITANFIPASTANLIFALPKATAEIYCNGENCIQNEYGIGSPQSKNQKAITGEMVKEICFPIKVDRLGNIIQVGSCILTN

SEQ ID NO: 157 - protein, 1399 aa, Olsenella uli
MNLRNTTDEYNIGLDMGTNSVGWAVTDKAGAIAHFKGKPTLGSRLFDAAQTAAGARIHRSQRRRYVRRRWRLDLLQSLFQDEVSKVDSEFFCRLRQSRLYVGDREKGHADYTWPIFNDSDFNEVDYYKRFPTIYHLRKWLMETDEKADIRLIYLATHNIVKHRGNFLRENNKSLSSRDANPAQAVKSLRLALNDWCSERDYECAWKGEEDDGAIDEAILNVLADGEKGRSDQAKEIAKLTGVDCGDAKQSKQCNEAIAKAIVGLKVEMKNIFGEFPAEKTSYIYLSSDEDVEAVRESCPDDSGELFQALCKLYSAYILQELLSYADPSGQTISANMVAKYKQYGRDLRLLKELTRTYAPQKYDLFFRGETYAGSSDYVVDEARGYTRYNLGTTKANYDDFQKSVKELFKGTDALQDERYQEMMVAFGEQKFLRRLKTSDNGSIYYQLHLEELHTILENQGKHYPFLLSEEDKIESLVSFRIPYYVGPLTRKNAAIGHDGKERFAWSSRKDGMEHAVITPWNWEEIIDRDKSAEDFIMRMTGDCTYLQGEPVLPKCSLLYEEFCALNEFNGAHWTVDGDDERRFDAAQRERIMCDLFRRTRSVTYNKVSDWLERKYNFTGARVRGGQGEHGFESKLGSYIFFCKDVFKTDGLDEADYTMIEQIILWSTLFEDRDILKRKIEEAYGGDRLTSEQIKVICKKRFTGWGRLSKRLLTDIKVNTDTGRKSIMDVLREGNPNNGQRSRTMVFMEVLRDEDLGFQKAIDGLNRDYFREHNNGLMDVNDLPGSPAIRRSINQAVRIVDEIASIARKEPTNIFIEVTREEDDPRKKGKRTKRRYDAIKSALEKFKKDDPSLWKELCEKAPGDMDERLSLYFMQRGKCMYSGRPIKIEELHTGKYEVDHIIPRSYIKDDSFENKVLVYREENQHKTDALLIDSSIRQKMGGYWRMLHDAKLVGDKKFRNLFRNHIDDKAMKGFVARQIVETSQMVKLVQTLFEARYPNTRIVPVKAGISHDLREAAGLVKCREANDFHHAHDAFLACRIGLFIQKRHPSVYDNPIGLARIMRDYARMQAREYKKSHCLAHTQGFIVNSFLSSGFDEETGEIFKDDWDAKAEVEGIRRVLNCRQCFISRMPVEGDTRYGGRYWGETIYSPKGKHKHEIPLKQGLDPNLYGGYSDLLYSYFLIYEASDVSSGERVLRFIGIPTSIAARMANQKRLEEYVSRLALQENLEHVRMVRKIMKKQLIEVDNCRLLVTAADAVTNATELAFSLDEMKIISTCAKCINGADPSAIDKIGNAQDSFFDNLKRRGSDRCALLFSQLKLDKLSQNFYMISSDDKSKILISILDRIRAKSNSVDLSLVGGAKHAAQMKFDFNAKLNNPASSFVLIDQSVTGMFERRTRIGL

SEQ ID NO: 158 - protein, 1398 aa, Veillonella atypica
METQTSNQLITSHLKDYPKQDYFVGLDIGTNSVGWAVTNTSYELLKFHSHKMWGSRLFEEGESAVTRRGFRSMRRRLERRKLRLKLLEELFADAMAQVDSTFFIRLHESKYHYEDKTTGHSSKHILFIDEDYTDQDYFTEYPTIYHLRKDLMENGTDDIRKLFLAVHHILKYRGNFLYEGATFNSNAFTFEDVLKQALVNITFNCFDTNSAISSISNILMESGKTKSDKAKAIERLVDTYTVFDEVNTPDKPQKEQVKEDKKTLKAFANLVLGLSANLIDLFGSVEDIDDDLKKLQIVGDTYDEKRDELAKVWGDEIHIIDDCKSVYDAIILMSIKEPGLTISQSKVKAFDKHKEDLVILKSLLKLDRNVYNEMFKSDKKGLHNYVHYIKQGRTEETSCSREDFYKYTKKIVEGLADSKDKEYILNEIELQTLLPLQRIKDNGVIPYQLHLEELKVILDKCGPKFPFLHTVSDGFSVTEKLIKMLEFRIPYYVGPLNTHHNIDNGGFSWAVRKQAGRVTPWNFEEKIDREKSAAAFIKNLTNKCTYLFGEDVLPKSSLLYSEFMLLNELNNVRIDGKALAQGVKQHLIDSIFKQDHKKMTKNRIELFLKDNNYITKKHKPEITGLDGEIKNDLTSYRDMVRILGNNFDVSMAEDIITDITIFGESKKMLRQTLRNKFGSQLNDETIKKLSKLRYRDWGRLSKKLLKGIDGCDKAGNGAPKTIIELMRNDSYNLMEILGDKFSFMECIEEENAKLAQGQVVNPHDIIDELALSPAVKRAVWQALRIVDEVAHIKKALPSRIFVEVARTNKSEKKKKDSRQKRLSDLYSAIKKDDVLQSGLQDKEFGALKSGLANYDDAALRSKKLYLYYTQMGRCAYTGNIIDLNQLNTDNYDIDHIYPRSLTKDDSFDNLVLCERTANAKKSDIYPIDNRIQTKQKPFWAFLKHQGLISERKYERLTRIAPLTADDLSGFIARQLVETNQSVKATTTLLRRLYPDIDVVFVKAENVSDFRHNNNFIKVRSLNHHHHAKDAYLNIVVGNVYHEKFTRNFRLFFKKNGANRTYNLAKMFNYDVICTNAQDGKAWDVKTSMNTVKKMMASNDVRVTRRLLEQSGALADATIYKASVAAKAKDGAYIGMKTKYSVFADVTKYGGMTKIKNAYSIIVQYTGKKGEEIKEIVPLPIYLINRNATDIELIDYVKSVIPKAKDISIKYRKLCINQLVKVNGFYYYLGGKTNDKIYIDNAIELVVPHDIATYIKLLDKYDLLRKENKTLKASSITTSIYNINTSTVVSLSNKVGIDVFDYFMSKLRTPLYMKMKGNKVDELSSTGRSKFIKMTLEEQSIYLLEVLNLLTNSKTTFDVKPLGITGSRSTIGVKIHNLDEFKIINESITGLYSNEVTIV

SEQ ID NO: 159 - protein, 795 aa, Prevotella disiens
MEKQRILGLDPGTNSLGWAVLDFDNSKQEYNLVRKGEVIFEEGVGKSKRGEFSKAAYRTFYKSTRKHYFRRRLRKIEVLKVLVKYDFCPYLSDDLLKQWHEKKIYPAVKEFMDWQRTSDAEGKNPYYDRHCCLNEKLDLSLKSDRYVLGRALYHLTQRRGFKSNRLIQNNDENEEGKVKKGISELSTEMQEANCNYLGDYFYKLYTEKGNTVQIRKRYTDREKHYKNEFNAICEKQELNETIVKELDKAIFFQRKLKPQRHGVGKCTFEPNNRRCAISHPDFERFRMLCFINNIKIKTPFEENLRPLNNEEKALIEPLFYRKSIKNFDFEEIAKKLAGKNNYCYIKDDSSKQYKFNYRMSQGASTCQTIAKLKSIFGEEWKNGIAETYTNRRKKEGLKKQAEMVDDIWNVLYSVSECDVLKDFAINKLQLDEKTADNFSKTKLAQGFATLSLKAIRKILPFLEQGFGYTEAVFLANIPTVVGKEYWNNEDIRNDIMEEIKTIFYHNTLKTNDSHNTILFCIKDILSNNFDLAPGAIDKLYHPSMINVYKDVIPNEDGILQLGSPKIDAVKNPMAMRSLHIIRKVVNELLREGIINSDTEVRIEYARELNDANKRHAIADWQKKQYGKHQKYRKEIKELFKAETGFEIEPNETDILKFELWEEQNHICLYTGQEIGISEFVGENPKYDIEHTIPRSLGGDSTKMNMTLCENKFNRENKQKKLPSELANHSEILERIDDWKKKIYILQKKYDSIRTHNGMDKENKDKKIVSMQVRISGSSICVYSQNTLLWLQYGYN

SEQ ID NO: 160 - protein, 1428 aa, Burkholderiales bacterium
MGKTHIIGVGLDLGGTYTGTFITSHPSDEAEHRDHSSAFTVVNSEKLSFSSKSRTAVRHRVRSYKGFDLRRRLLLLVAEYQLLQKKQTLAPEERENLRIALSGYLKRKGYARTEAETDTSVLESLDPSVFSSAPSFTNFFNDSEPLNIQWEAIANSPETTKALNKELSGQKEADFKKYIKTSFPEYSAKEILANYVEGRRAILDASKYIANLQSLGHKHRSKYLSDILQDMKRDSRITRLSEAFGSTDNLWRIIGNISNLQERAVRWYFNDAKFEQGQEQLDAVKLKNVLVRALKYLRSDDKEWSASQKQIIQSLEQSGDVLDVLAGLDPDRTIPPYEDQNNRRPPEDQTLYLNPKALSSEYGEKWKSWANKFAGAYPLLTEDLTEILKNTDRKSRIKIRSDVLPDSDYRLAYILQRAFDRSIALDECSIRRTAEDFENGVVIKNEKLEDVLSGHQLEEFLEFANRYYQETAKAKNGLWFPENALLERADLHPPMKNKILNVIVGQALGVSPAEGTDFIEEIWNSKVKGRSTVHSICNAIENERKTYGPYFSEDYKFVKTALKEGKTEKELSKKFAAVIKVLKMVSEVVPFIGKELRLSDEAQSKFDNPYSLAQLYNLIETERNGFSKVSLAAHLENAWRMTMTDGSAQCCRLPADCVRPFDGFIRKAIDRNSWEVAKRIAEEVKKSVDFTNGTVKIPVAIEANSFNFTASLTDLKYIQLKEQKLKKKLEDIQRNEENQEKRWLSKEERIRADSHGICAYTGRPLDDVGEIDHIIPRSLTLKKSESIYNSEVNLIFVSAQGNQEKKNNIYLLSNLAKNYLAAVFGASDLSQITNEIESTVLQLKAAGRLGYFDLLSEKERACARHALFLNSDSEARRAVIDVLGSRRKASVNGTQAWFVRSIFSKVRQALAAWTQETGNELIFDAISVPAADSSEMRKRFAEYRPEFRKPKVQPVASHSIDAMCIYLAACSDPFKTKRMGSQLAIYEPINFDNLFTGSCQVIQNTPRNFSDKTNIANSPIFKETIYAERFLDIIVSRGEIFIGYPSNMPFEEKPNRISIGGKDPFSILSVLGAYLDKAPSSEKEKLTIYRVVKNKAFELFSKVAGSKFTAEEDKAAKILEALHFVTVKQDVAATVSDLIKSKKELSKDSIENLAKQKGCLKKVEYSSKEFKFKGSLIIPAAVEWGKVLWNVFKENTAEELKDENALRKALEAAWPSSFGTRNLHSKAKRVFSLPVVATQSGAVRIRRKTAFGDFVYQSQDTNNLYSSFPVKNGKLDWSSPIIHPALQNRNLTAYGYRFVDHDRSISMSEFREVYNKDDLMRIELAQGTSSRRYLRVEMPGEKFLAWFGENSISLGSSFKFSVSEVFDNKIYTENAEFTKFLPKPREDNKHNGTIFFELVGPRVIFNYIVGGAASSLKEIFSEAGKERS

SEQ ID NO: 161 - protein, 1025 aa, gamma proteobacterium
MGGYMPQLMRYRLALDIGSTSIGWAMIRLSMQNEPIAIIRMGVRIFSDGRNPKDGSSLAVTRRVARQMRRRRDRLLKRKTRLLNALVQKKFFPEDADARKALVVLNPYELRKEGLYRQLSGPEFGRALFHISQRRGFLSNRKTDKKDNDSSVLKKAIVDLRQQLEVENCQTIGEWLFKQQQSGKSVRARLRGKTQKDKAYDFYIDRAMIAHEFDTLWVSQAKYDPLLFNEDARAILRDILLYQRPLKPVKPGRCTLIPDESRAPLALPLTQQARIYQELNHLRITTPALGAQALTVAQRNTIAALLEKSDVTFVKIAKALGLTSTTEFNLQDIKRDRLKGNATAIILARNQYFGRRWHDFNADLQNLIVDKLVNEGSETALIEWLKANTDVDESAAERVSGVTLPEGYGSLSVAALRRLLPALKEDVVVYSEAVKRAGFDSHSALSLIEQTGELYQELPYYGEVLQRHVGFGSGDPNDSPERRFGKIANPTVHIGLNELRKIINALIKRYGNPAEVVVELARDLKLSREKRKEIQEEQKQRQDRNEKRIKDACEILGIDPLVIDRGKRREISQKMQLWDELNPKDAANRRCPYTGDQISIEKLLSAEVEIEHILPFSKTLDDSLNNKTVAMRRANRDKGNRTPYEAFGESLNPDYDYDAILQRASLMPREKRKRFASDGYQQWLRDDKDFLSRALNDTAYLSRIAKEYLTLICPPNSVRAIPGRMTAQLRAMFGLNRLLSEGGIKNREDHRHHAIDAAVIGVTDQGLLQKFSRASARTRELQLSRLVDDMPLPWDTYREHVTRALEHLVVSHKPDHGYQGKMHEDTAWGLRDNGQVTRRVRSEDGGPRQRLLENKNVVKINSTRDFSRHGIDEQGQVNAYKGYVGGSNYCIEIWIDEKGKWNSDVVSTFQAYQIVRELGEKAAWQKLRNPLLSLSAKPLVMRLIIDDVVKMQIAGQNKIMRVVKIAQNGQIFFAEHNEANVDARDKDKNNPFKYISKTAGSLQKAGGIHMAISPIGDARPVRYGR

SEQ ID NO: 162 - protein, 1364 aa, Pediococcus acidilactici
MGDRKYNLGLDIGTSSIGFAAVDENNQPIRVKGKTAIGVRLFEEGKTAADRRGFRTTRRRLSRRRWRINLLNEIFDAHLAEVDPTFLARLKESNRSNLDPKKSFQGSLLFPERKDYQFYEEYPTIYHLRKALMEKDRKFDFREIYLAVHHIIKYRGNFLNGTPMRSFKVENIELDTLFDQLNQLYAEIVPDNELAFDLAQVADVKDVLSSTTIYKMDKKKQLVKMMLLPASNKALQSENKKIVTQFVNAILNYKFKLDVLLQVETDADWSLKLNDEGADDKLEEFTGDLDENRLEIIDLLQRLHNWFSLNEITKDGNSLSAAMVEKYENHHHHLGLLKKVIENHPDAKKAKALKETYTAYVGKTDDKTQNQDDFYKAVEKNLDDSPDAKEIKRLIQLDQFMPKQRTGQNGAIPHQLHQQELDQIIEKQSKYYPFLAEPNPNVKRRKDAPYKLDELIAFKIPYYVGPLVTPEEQAQNGENVFAWMKRKAAGPITPWNFDEKVDRMESANRFIRRMTTKDTYLFGEDVLPAESMIYQKFVVLNELNNLKINGRHLSLKDKQDVYNDLFKQQKTVSIKALQNYYVTKKKAATAPTVGGLADPKKFLSSLSTYIDFKNMFGERVNDPQFQEDLEQIVEWSTIFEDRGIFKAKLQALGWLSEKQIQQLVAKRYKGWGRLSKKLLTGLKNAEGYSILDEMWRSTGNFMQIQSRPEFAALIQQANEKQFEGNDPDNVWENIENILGDAYTSPQNKKAIRQVVKVVQDIEKAVGNPPEKIAIEFTREAAANPQRTQSRLRTLEKLYESAEEVVDAGLTAELAEFKENKHVLSDKYYLYFTQLGRDVYTGDTISLDKLNDYDVDHILPQSFIKDDSLDNRVLTIRAVNNGKSDNVPAKMFGKKMGSFWRYLLDNGMISKRKYNNLITDPDNISKYAQKGFINRQLVETSQVIKLTANILNGIYDKDTEIIEVPAKMNSQMRKMFDLVKVREVNDYHHAFDAYLTIFIGNYLYKCYPKLQPYFVYDNFKKFGNKEDIGHKRFNFLGKIEREKKVVAPETGEILWSNVAPNETIKQIKKVYDYKFMIVSREITTRRAELFNQTVYPKNYHGKLIPIKEDRPTDLYGGYSGNTDAYLAIVALEDKKKGKYFKVVGIPTRVAAKLEKLKQQDSQQYLQALHKVIAPQFTKSTKKGIKKTEFEIVLDKVHYRQLVQDGPVKMMLGSSTYKYNAKQLVLSEKALQVIADDRKFDETQKDDNLIAVYDEILSIVNQSFDLYDINGFRKKLNDNRDQFIDLPAETKYEGRKVVAHGKREMILEILKGLHANAAFGNLKPIGFSTAFGQLQVPNGIILSKNAILIHQSPSGLFERKIKLSDL

SEQ ID NO: 163 - protein, 1364 aa, Peptoniphilus duerdenii
MKNLKEYYIGLDIGTASVGWAVTDESYNIPKFNGKKMWGVRLFDDAKTAEERRTQRGSRRRLNRRKERINLLQDLFATEISKVDPNFFLRLDNSDLYREDKDEKLKSKYTLFNDKDFKDRDYHKKYPTIHHLIMDLIEDEGKKDIRLLYLACHYLLKNRGHFIFEGQKFDTKNSFDKSINDLKIHLRDEYNIDLEFNNEDLIEIITDTTLNKTNKKKELKNIVGDTKFLKAISAIMIGSSQKLVDLFEDGEFEETTVKSVDFSTTAFDDKYSEYEEALGDTISLLNILKSIYDSSILENLLKDADKSKDGNKYISKAFVKKFNKHGKDLKTLKRIIKKYLPSEYANIFRNKSINDNYVAYTKSNITSNKRTKASKFTKQEDFYKFIKKHLDTIKETKLNSSENEDLKLIDEMLTDIEFKTFIPKLKSSDNGVIPYQLKLMELKKILDNQSKYYDFLNESDEYGTVKDKVESIMEFRIPYYVGPLNPDSKYAWIKRENTKITPWNFKDIVDLDSSREEFIDRLIGRCTYLKEEKVLPKASLIYNEFMVLNELNNLKLNEFLITEEMKKAIFEELFKTKKKVTLKAVSNLLKKEFNLTGDILLSGTDGDFKQGLNSYIDFKNIIGDKVDRDDYRIKIEEIIKLIVLYEDDKTYLKKKIKSAYKNDFTDDEIKKIAALNYKDWGRLSKRFLTGIEGVDKTTGEKGSIIYFMREYNLNLMELMSGHYTFTEEVEKLNPVENRELCYEMVDELYLSPSVKRMLWQSLRVVDEIKRIIGKDPKKIFIEMARAKEAKNSRKESRKNKLLEFYKFGKKAFINEIGEERYNYLLNEINSEEESKFRWDNLYLYYTQLGRCMYSLEPIDLADLKSNNIYDQDHIYPKSKIYDDSLENRVLVKKNLNHEKGNQYPIPEKVLNKNAYGFWKILFDKGLIGQKKYTRLTRRTPFEERELAEFIERQIVETRQATKETANLLKNICQDSEIVYSKAENASRFRQEFDIIKCRTVNDLHHMHDAYLNIVVGNVYNTKFTKNPLNFIKDKDNVRSYNLENMFKYDVVRGSYTAWIADDSEGNVKAATIKKVKRELEGKNYRFTRMSYIGTGGLYDQNLMRKGKGQIPQKENTNKSNIEKYGGYNKASSAYFALIESDGKAGRERTLETIPIMVYNQEKYGNTEAVDKYLKDNLELQDPKILKDKIKINSLIKLDGFLYNIKGKTGDSLSIAGSVQLIVNKEEQKLIKKMDKFLVKKKDNKDIKVTSFDNIKEEELIKLYKTLSDKLNNGIYSNKRNNQAKNISEALDKFKEISIEEKIDVLNQIILLFQSYNNGCNLKSIGLSAKTGVVFIPKKLNYKECKLINQSITGLFENEVDLLNL

SEQ ID NO: 164 - protein, 1089 aa, Corynebacterium matruchotii
MNSANVNYRVGIDVGSYSLGMAAIAIDDDGKPTEILSAISLIHDSGVDPDSAKSAATRLATSGIARRTRRLYRRKRKRLAKLDKFISSQGWPLKEFEKYEDPFYPWRVRAELATTAITDQQELGEKLSIALRHIARHRGWRNPYSKVTALYTVTEPSDAFLAMQEECAKQLGRTIPETITVGQLVTGMNLGKTRLRGENSLLAARPRQSDNANEIHTIAKVQGLSNELVRQIIDHVFAAESPKGSAAEQVGKDPLQPTKKRALKASDAFQQYRIAALIGNLRIRGGKGNRRLTTEETRLVFDYLRSLPAKQEPTWQLVAEQLKIDRGNLVGTAIMTDDGERAGAKPPVHDTNRIMENTKIKPLATWWKSADADARAAMVKALSNAEVDDFDSQAGAQVQEFFFGISDEDQEKLDGLHLPIGRAAYSEDTLDRLTKRMIGEGMDLYEARQAEFKISNDWAPPAPEIGERVGNPAVDRVLKATARWLNAAERQWGAPKSVNIEHVRAAFMSESSARELDRDNQQRAKRNVKVVAEMQEKLGIEGRPSRADVWRFQSIQRQNGKCAYCGAEISFKNSEMDHIIPQAGEGSTNTRDNLVAVCRECNSSKSNIAFAVWAENTSRPGVSVQKAIERTHHWVTDSGLRKPEFDKFRKQVCDRLRRKATDEPIDARSLESVAWMANELRSRIAQKFKDGDTKVRVYKGALTAEARRASGISGKLEFVDGKGKSRLDRRHHAVDAAVVAFTSNYVAETLALRSNMKFDQELRRKAPQWREFTGSDHVHQVEWTKWKYRMQALAELLNNALVQDRIVVMHNLRLRLGNGAAHEDTIGKLTRLKVGDAISTTDIDRASSEALWCALTRDPDYDPKTGLPENPNRTIRIHGTHLTASDEITVFPVAAASIPIRDGFAKLGSNYHHVRLFRVPSGKKYKYCLMQVYTVDLLKFRKEDLFTVELKPQTISVRTCEALLRKALANGTAEYLGWLVSDDELLIDTSSFDTPGIVKLREEYGPVNRWRLAGLTSVTRLNLRPLYLSKEGLKPNVNPEIKKIIDNRSWIITVNKLFSSGHVKIIRRDALGRPRLHSAAHLPICWEVK

SEQ ID NO: 165 - protein, 1134 aa, Streptococcus mitis
MNGLVLGLDIGIASEGVGILEKNSGKIIHANSRLFPAATADNNVERRKNRQARRLNRRKKHRGVRFQDLFEDYGLLTDFSKVSINLNPYRLRVDGLNQQLTNEELFIALKNIVKRRGISYLDDASEDGGAVSSDYGKAVEENRKLLAEQTPGQIQLERFEKYGQVRGDFTVVENGEKLRLINVFSTSAYKKEAERILRKQQEFNNQITDEFIEDYLKILTGKRKYYHGPGNEKSRTDYGRFRTDGTTLDNIFGILIGKCTFYPEEYRASKASYTAQEFNLLNDLNNLTVPTETKKLSEEQKKVIVEYAKEAKTLGASTLLKYIAKMIDASVDQIRGYRVDVNNKPEMHTFEVYRKMQSLETISVGELSRNVLDELAHILTLNTEREGMEEAINTKLKDSFSQDQVLELVQFRKNNSSLFSKGWHNFSLKLMMELIPELYETSEEQMTILTRLGKQKSKETSKRTKYIDEKELTEEIYNPVVAKSVRQAIKIINEATKKHGIFDNIVIEMARENNEEDAKKDYIKRQKANQDEKNAAMEKAAFQYNGKKELPDNIFHGHKELATKIRLWHQQGEKCLYTGKTIPISDLIYNQYKYEIDHILPLSLSFDDSLSNKVLALATANQEKGQRTPFQALDSMDDAWSYREFKSYVKDLKSLSNKKKDYLLTEEDISKIEVKQKFIERNLVDTRYSSRVVLNALQDFYKSHQFDTTISVVRGQFTSQLRRKWGLEKSRETYHHHAVDALIIAASSQLRLWKKQNNPLITYKEGQFVDSQTGEIISLTDDEYKELVFKAPYDHFVDTLSSKTFEDSILFSYQVDSKFNRKISDATIYATRKAKLDKEKKEYTYTLGKIKDIYSLGTKTPSKTGFYKFLDLYNKDKSQFLMFQKDRKTWDEVIEKIMEQYRPFKEYDKTGKLVDFNPFEKYRQENEPIRKYSKKGNGPEIKSLKYYDILLGKHKNITPEGSRNTVALLSLNPWRTDVYYNMETKKYEFLGLKYADLPFEEGGAYGISTETYNELREKEGIGKNSEFKFTLYKNDLILIKDTETNCQQIFRFWSRTGKDNPKSFEKHKIELKPYEKARFEKGEELEVLGKVPPSSNQLQKNMQIENLSIYKVKTDVLGNKHFIKKEGDKPKLKF

SEQ ID NO: 166 - protein, 1373 aa, Streptococcus bovis
MTKKNYSIGLDIGTNSVGWAVITDDYKVPAKKMKVLGNTDKKYIKKNLLGALLFDSGETAEATRLKRTARRRYTRRKNRLRYLQEIFAEEMTKVDESFFQRLDESFLRWDDDNKKLGRYPIFGNKADVVKYHQEFPTIYHLRKHLADSSEKADLRLVYLALAHMIKFRGHFLIEGELNAENTDVQKIFADFVGVYDRTFDDSHLSEITVDAASILTEKISKSRRLENLIKYYPTEKKNTLFGNLIALALGLQPNFKMNFKLSEDAKLQFSKDSYEEDLGELLGKIGDDYADLFTSAKNLYDAILLSGILIVDDNSTKAPLSASMIKRYVEHQEDLEKLKEFIKANKSELYHDIFKDKNKNGYAGYIENGVKQDEFYKYLKNTLSKIAGSDYFLDKIEREDFLRKQRTFDNGSIPHQIHLQEMHAILRRQGDYYPFLKENQDRIEKILTFRIPYYVGPLARKDSRFSWAEYHSDEKITPWNFDKVIDKEKSAEKFITRMTLNDLYLPEEKVLPKHSHVYETYAVYNELTKIKYVNEQGKDSFFDSNMKQEIFDHVFKENRKVTKEKLLNYLNKEFPEYRIKDLIGLDKENKSFNASLGTYHDLKKILDKAFLDDKVNEEVIEDIIKTLTLFEDKDMIHERLQKYSDIFTADQLKKLERRHYTGWGRLSYKLINGIRNKENNKTILDYLIDDGSANRNFMQLINDDTLPFKQIIQKSQVVGDVDDIEAVVHDLPGSPAIKKGILQSVKIVDELVKVMGDNPDNIVIEMARENQTTNRGRSQSQQRLKKLQNSLKELGSNILNEEKPSYIEDKVENSHLQNDQLFLYYIQNGKDMYTGDELDIDHLSDYDIDHIIPQAFIKDDSIDNRVLTSSAKNRGKSDDVPSLDIVRARKAEWVRLYKSGLISKRKFDNLTKAERGGLTEADKAGFIKRQLVETRQITKHVAQILDARFNTESDENDKVIRDVKVITLKSNLVSQFRKDFEFYKVREINDYHHAHDAYLNAVVGTALLKKYPKLASEFVYGEYKKYDIRKFITNSSDKATAKYFFYSNLMNFFKRVIRYSNGKVIVRPVVEYSKDTEDIAWDKKSNFRTICKVLSYPQVNIVKKVETQTGGFSKESILPKGDSDKLIPRKTKKAYWDTKKYGGFDSPTVAYSVFVVADVEKGKAKKLKTVKELVGISIMERSFFEENPVEFLENKGYHNIREDKLIKLPKYSLFEFEGGKRRLLASASELQKGNEMVIPGHLVKLLYHAQRINSFNSTKYLDYVSAHKKEFEKVLSCVEDFANLYVDVEKNLSKIRAVADSMDNFSIEEISNSFINLLTLTALGAPADFNFLGEKIPRKRYTSTKECLNATLIHQSITGLYETRIDLSKIGEE

SEQ ID NO: 167 - protein, 1099 aa, Corynebacterium accolens
MSLLYRVGIDVGTYSLGCTAIEVDDNDQPVSILSSVSLIHDSGLDPDQQKRAVTRLASSGVARRTRRLYRRRRRRMVKLENFLTAQGWETLPFERYSDPYLPWHARVALVNGYISDDTQRGQYLSIAFRHIANHRGWRNPYWKVSSLYSPDKPSDAFEQIRKELEASTGRQIPETATVGQLISFAQFGKDRLRGGGKQKDKKKPQEQVNQAVISARLHQIDHAREINEICRVQKIDDTLRKQILDLVFAAESPKGAQKGRVGKDPLQPKLFRALKASDAFQQYRIAALTGNLRIYRNGVTVPLDRDEKLIVFNYLVNLPKKEEPSWLKIAEILNIDRGQLRGTATMTDDGERAGATPPVHDTNRTILDSKVKPLAHWWENASDDERAAMLKSLSNSEVEDFDSPAGAQVQAFFADLDETEQEKLDSLHLPMGRAAYSEDTLMRLTNRMLDENLDLYEARLAEFGIPKDWAPPAPRIGEPVGNPAVDRVLKGVARWLEAAADEWGAPKSVVIEHVRDGFVSKSKAIEIDRANNNRHKRNRELFQKMQENLGIEGKVRSSDLWRYQSVQRQNCQCAYCGSPITYTTCEMDHIVPRAGEGSTNTRDNLVATCHRCNLAKKNIPFAVWAEKSTIPGVSVKEALDRTRHWSEDSGMSKKDFQKFRKNVCERLNRTVVDEPLDARSMESVAWMANELRGRVAQRFQEENTTVNVYRGALTAEARRAAGITDKLRFIDGTGKSRLDRRHHAVDAAVVAFIHNYVAETLAIRSNKKREAQLLQGTSQWKEFTGSDDKHRAVWNAWIPKMQKLAVLLQIALDEDRIVVTSNLRLRLGNGRAHEDTISELKTIRVGDAISVTDIDRASSEALWCALTREPDFDEKDGLPENPNRRIRVHGTWYDAEDEIEVFPVGAGAIKVRGGYAKLSRFHHARVYKIPGKKAPIYCMLRVYNTDLVQHRHEDLFSVELKPQTMSVRQAEPKLRKALAENTAEYLGWLVTDDELIIDTSTFRTGLIEEMQSEFGLVRRWRLDGFDSPSLLTLRPLHMSAEGLPDDCALGSRKIIDTKGWRVSINKVFNAGNTTVVRRDALGRARLTSNAHLPISWKEE

SEQ ID NO: 168 - protein, 1054 aa, Actinobacillus pleuropneumoniae
MKLTPLNYILGLDLGIASVGWAVVEIDEQENPLGLIDVGVRTFDRAEVAKTGESLALARRLARSSRRLVKRRADRIKKVKRLLKSENILLSADEQLPNDVWQLRVKGLDQKLERQEWAAVLLHLLKHRGYLSQRKNESKSENKELGALRSGVAANHQILQSAEYRTPAEIAVKKFHVEEGHIRNQRGAYTHTFSRLDLLAEIELLFTRQTELGNPHTSAKLLENLTALLMWQKPALAGEAILKMLGKCTFEPTEYKAAKNSYSAERFVWLTKLNNLRILEQGAERALTDNERFALLDQPYEKAKFTYAQARTMLALPDEAIFKGVRYQGEDKKAVETKTILMEMKAYHQIRKALENADLKAEWNELKNNSELLDDIGTAFSLHKTDEDICRYLDGKLSESILNALLENLNFDKFIQLSLKALQQILPLMLQGQRYDEAVSAIYGDHYGKKSAEINRLLPTIPADEIRNPVVLRTLTQARKVINAVVRLYGSPARIHIETGREVGKSYQDRKKLEKQQEDNRKHRESAVQKFKEYFPNFVGEPKGKDILKMRLYELQQAKCLYSGKSLELHRLLEKGYVEVDHALPFSRTWDDSFNNKVLVLANENQNKGNLTPYEWLDGKNNSEPWQNFVARVQTSGFSHTKKQRILSHKLDEKGFIERNLNDTRYVVRFLCNFIADNMLLTGKGKRKVFASNGQITALLRGRWGLQKVRDDNDRHHALDAVVVACSTVAMQQKITRFVRYEEGNVFSGERIDRETGEIIPLHFPSPWAFFRENVEIRIFSENPKLELENRLPDYPQYNHEFVQPLFVSRMPTRKMTGQGHMETVKSAKRLDEGLSVLKVPLTQLKLNDLERMVNREREMALYESLKVRLEQFDNDPAKAFAEPFYKKGGALVKAVRVEQTQKSGVLVRDGNGVADNASMVRVDVFTKAGKYFLVPIYTWQVAKGILPNKAVTANVDEIDWLEMDESYQFIFTMYPNDLVKVKLKKEEFFGYYGGLDRATGAIVIKEHDLEKSKGRQGIYRIGVKLALSFEKYQVDELGKNIRPCRPTKRQHVR

SEQ ID NO: 169 - protein, 1369 aa, Lactobacillus iners
MNNNYYLGLDLGTNSVGWAVTDDHYNIIKFHGKHMWGMRLFEEAETAKDRRLHRQARRRRQRLVERINLLEELFDKEISKVDQGFFARKKESDLHFEDKTTKSEYALFNDKSYTDRDYYKQYPTIFHLIMDLIENDKKRDIRLVYLACHYLIKHRGHFIFDGKNFTVDNSFENLLDKLITYLKDNDDITLSFPKDQLINIFKNSNLNSTEKSDQLKPFFGRTNLEKGIIKLLSGGKQDLSNMFRDETLKNSNYKNLKFSDNRFDDERDGYAADLGDRIDLLILLKQIYDASILESMMSQARVSIDGHKYISSAKVCAYEKHKSDLKRLKSLIKKYLPSEYNNIFRKITEKDNYVAYSKSNITNNKREKALKYVKYVDFTKYLTKKLKTIKTQDAEDDQEIFEIKGELEKQSFLPKQRTLDNSIIPYQLHLMELKKILDNQSKYYDFLLAKDDQEGITVKDKIISLLTFRLPYYIGPVNPAVHGKFAWVKRLANGKVTPWNYKEKIDIDASHEEFIKTKLSKCSFLIGCDVLPKNSLLYQKYMVLSELNTIKFNGVNISEKLKDDIYQNLFKNIQKVTKKRLQNYIKEHENIIGDVIVTGIDNAFKQGLVSYLKFKKIIGDKVDDDRYQKVLEKIIRDITLYDECAGKKIKKEYKDSDLFTEDELNKIVKLTFNDWGRLSAELLDQLEGEDTVSGETGKIIEFMQKHNYNLMQLMSKKFTFKSKIDEINKSYYQHDKFNYKSMIDSLYVSPATKRILWQSLKVVHEISKIMKHDPEKIFIEMARSKEDHPKRKLSRKADLKQVYKDSKKQIISIIGKDKYQDLSNELDNKDDRDLRWDNLYLYYTQLGRSMYSLKPIDISELMNKNLYDQDHIFPKSKKYDDSIENRVLVEKELNVKKSDIYPISDANIIPQKIKGQVESFWKMLYDHKLIGDKKYARLIRSKAFTDDELAGFIARQLVETRQATKETADLLKRLCPKSRIVYAKAQNASIFRQKFDIPKSRTINDLHHAQDAYLNIVVGNIFDTKFTQDPRNFIKNTKDSRNYNLEKIYDYNVERNNYVAWIAPDGETNGTIANVKCNLSTKDFRVTRPSFYKKGALFNQNLSRKGSNLAPIKEHSPKSNPLKYGGYSGKNNSFFVVVAGKDNKGKDIVKLIPVNTLIYNKMLHCDYKAKQELLTSYVANNFAINNFRIVKDDIKMYSLVKIDGAYYYLVGGTDERIEVKNAMQLLLSKDSIKAVKILEKESKDQFANIKNYKDIDIKLGRTFNEVVSKYTNSVFGKSMLISDKYRKDIFKSVEKSILEFNHLDTIGKADNLLKFVTLMRPSGSAHSLKMVGLIERIRKSNVISNFNEFKLINQSVTGLFENEEDLLKL

SEQ ID NO: 170 - protein, 1420 aa, Bifidobacterium bifidum
MSRKNYVDDYAISLDIGNASVGWSAFTPNYRLVRAKGHELIGVRLFDPADTAESRRMARTTRRRYSRRRWRLRLLDALFDQALSEIDPSFLARRKYSWVHPDDENNADCWYGSVLFDSNEQDKRFYEKYPTIYHLRKALMEDDSQHDIREIYLAIHHMVKYRGNFLVEGTLESSNAFKEDELLKLLGRITRYEMSEGEQNSDIEQDDENKLVAPANGQLADALCATRGSRSMRVDNALEALSAVNDLSREQRAIVKAIFAGLEGNKLDLAKIFVSKEFSSENKKILGIYFNKSDYEEKCVQIVDSGLLDDEEREFLDRMQGQYNAIALKQLLGRSTSVSDSKCASYDAHRANWNLIKLQLRTKENEKDINENYGILVGWKIDSGQRKSVRGESAYENMRKKANVFFKKMIETSDLSETDKNRLIHDIEEDKLFPIQRDSDNGVIPHQLHQNELKQIIKKQGKYYPFLLDAFEKDGKQINKIEGLLTFRVPYFVGPLVVPEDLQKSDNSENHWMVRKKKGEITPWNFDEMVDKDASGRKFIERLVGTDSYLLGEPTLPKNSLLYQEYEVLNELNNVRLSVRTGNHWNDKRRMRLGREEKTLLCQRLFMKGQTVTKRTAENLLRKEYGRTYELSGLSDESKFTSSLSTYGKMCRIFGEKYVNEHRDLMEKIVELQTVFEDKETLLHQLRQLEGISEADCALLVNTHYTGWGRLSRKLLTTKAGECKISDDFAPRKHSIIEIMRAEDRNLMEIITDKQLGFSDWIEQENLGAENGSSLMEVVDDLRVSPKVKRGIIQSIRLIDDISKAVGKRPSRIFLELADDIQPSGRTISRKSRLQDLYRNANLGKEFKGIADELNACSDKDLQDDRLFLYYTQLGKDMYTGEELDLDRLSSAYDIDHIIPQAVTQNDSIDNRVLVARAENARKTDSFTYMPQIADRMRNFWQILLDNGLISRVKFERLTRQNEFSEREKERFVQRSLVETRQIMKNVATLMRQRYGNSAAVIGLNAELTKEMHRYLGFSHKNRDINDYHHAQDALCVGIAGQFAANRGFFADGEVSDGAQNSYNQYLRDYLRGYREKLSAEDRKQGRAFGFIVGSMRSQDEQKRVNPRTGEVVWSEEDKDYLRKVMNYRKMLVTQKVGDDFGALYDETRYAATDPKGIKGIPFDGAKQDTSLYGGFSSAKPAYAVLIESKGKTRLVNVTMQEYSLLGDRPSDDELRKVLAKKKSEYAKANILLRHVPKMQLIRYGGGLMVIKSAGELNNAQQLWLPYEEYCYFDDLSQGKGSLEKDDLKKLLDSILGSVQCLYPWHRFTEEELADLHVAFDKLPEDEKKNVITGIVSALHADAKTANLSIVGMTGSWRRMNNKSGYTFSDEDEFIFQSPSGLFEKRVTVGELKRKAKKEVNSKYRTNEKRLPTLSGASQP

SEQ ID NO: 171 - protein, 1092 aa, Ilyobacter polytropus
MKYSIGLDIGIASVGWSVINKDKERIEDMGVRIFQKAENPKDGSSLASSRREKRGSRRRNRRKKHRLDRIKNILCESGLVKKNEIEKIYKNAYLKSPWELRAKSLEAKISNKEIAQILLHIAKRRGFKSFRKTDRNADDTGKLLSGIQENKKIMEEKGYLTIGDMVAKDPKFNTHVRNKAGSYLFSFSRKLLEDEVRKIQAKQKELGNTHFTDDVLEKYIEVFNSQRNFDEGPSKPSPYYSEIGQIAKMIGNCTFESSEKRTAKNTWSGERFVFLQKLNNFRIVGLSGKRPLTEEERDIVEKEVYLKKEVRYEKLRKILYLKEEERFGDLNYSKDEKQDKKTEKTKFISLIGNYTIKKLNLSEKLKSEIEEDKSKLDKIIEILTFNKSDKTIESNLKKLELSREDIEILLSEEFSGTLNLSLKAIKKILPYLEKGLSYNEACEKADYDYKNNGIKFKRGELLPVVDKDLIANPVVLRAISQTRKVVNAIIRKYGTPHTIHVEVARDLAKSYDDRQTIIKENKKRELENEKTKKFISEEFGIKNVKGKLLLKYRLYQEQEGRCAYSRKELSLSEVILDESMTDIDHIIPYSRSMDDSYSNKVLVLSGENRKKSNLLPKEYFDRQGRDWDTFVLNVKAMKIHPRKKSNLLKEKFTREDNKDWKSRALNDTRYISRFVANYLENALEYRDDSPKKRVFMIPGQLTAQLRARWRLNKVRENGDLHHALDAAVVAVTDQKAINNISNISRYKELKNCKDVIPSIEYHADEETGEVYFEEVKDTRFPMPWSGFDLELQKRLESENPREEFYNLLSDKRYLGWFNYEEGFIEKLRPVFVSRMPNRGVKGQAHQETIRSSKKISNQIAVSKKPLNSIKLKDLEKMQGRDTDRKLYEALKNRLEEYDDKPEKAFAEPFYKPTNSGKRGPLVRGIKVEEKQNVGVYVNGGQASNGSMVRIDVFRKNGKFYTVPIYVHQTLLKELPNRAINGKPYKDWDLIDGSFEFLYSFYPNDLIEIEFGKSKSIKNDNKLTKTEIPEVNLSEVLGYYRGMDTSTGAATIDTQDGKIQMRIGIKTVKNIKKYQVDVLGNVYKVKREKRQTF

SEQ ID NO: 172 - protein, 994 aa, Streptococcus downei
MENQRGKRQRITHQEPYSIGLDIGTASVGSAVINNDLTVPQKRFKVRDINGNVIKTIKKNMSSVLIFDEANPAKGARTKRTSRRRYTRRNFRLLELKKLFEKEIEKIDPNFFHRIKEDSFFNWNDKEFDKHPLFGNLKEEKKFHNNYPTVFHLRNEIGKNSSKKFDLRLVYLALAHIIKYRGHFLDETFDPDASVSVEKRLNDFIVEYNELFDKDLRSEAKFSEILMSDSSNSVKIESTLSLYPSEKNTIFQVFLKLIVGNQGDFNKFFKDELESSSHSGKLVFSSDEVEDEKEELISIIGEDYLDIINLCQSLYSTVALAKIISTDTGESNTPLSASMVKRYNEHKGDLANLKGIVKHFIPEKYEEVFGEHSKTGYTAYIRNPNKMPEKKFYDYLYHEGEKGKISGILSDSRIYELPAVQKFILKIEQKSFLKKQRTKENGLIPYQLHLKELKIIIENQSEYYPFLHEIEEKLEKLLTFRIPYFVGPLAQTKYINPRFNWLVRKSEDHIKPWNFSEIVDEEKSATKFIEKLISNDQFLFGEKVLPKRSIIYQQFLIFNELTKVSYQIKDGPSRNFDSETKEEIFNSLFKKNKLGCVTVVDLKNYIKNDQCLSEKEDIQIEGIKKKFNSSYSTYADLSEISGLKELLDDDTQLDLVEEIIRILTVFEDKKMRTKQLEKLNLPANVDIEKLCKKHYKGWANVSRQLIDGIADRSRGFKKTILDYLKDDDIPNNDAFSTKVQKSLNRNFAQLITDKSLDFARKLDESYKIDVKKDYPSLVEDIPGSPAIRRAILQSLYTVDEIIGVMGRMPKNIVIEMARTNEVSDSPKTRKERIKKLIKETENDADALNFGISKVSEIFDEVKKDENLFKELEVYLYFLQEGKDMYGTETREGHRQPKEINFYDVKNSTGKYHIDHIIPQSLYSGNPLDNIVLTESTNNKIKDKDVPDEATVYEMKNFWLYLMKKGAISKKKFSFLTKIEQGGLSNEDKFGFINR

SEQ ID NO: 173 - protein, 1052 aa, Aminomonas paucivorans
MIGEHVRGGCLFDDHWTPNWGAFRLPNTVRTFTKAENPKDGSSLAEPRRQARGLRRRLRRKTQRLEDLRRLLAKEGVLSLSDLETLFRETPAKDPYQLRAEGLDRPLSFPEWVRVLYHITKHRGFQSNRRNPVEDGQERSRQEEEGKLLSGVGENERLLREGGYRTAGEMLARDPKFQDHRRNRAGDYSHTLSRSLLLEEARRLFQSQRTLGNPHASSNLEEAFLHLVAFQNPFASGEDIRNKAGHCSLEPDQIRAPRRSASAETFMLLQKTGNLRLIHRRTGEERPLTDKEREQIHLLAWKQEKVTHKTLRRHLEIPEEWLFTGLPYHRSGDKAEEKLFVHLAGIHEIRKALDKGPDPAVWDTLRSRRDLLDSIADTLTFYKNEDEILPRLESLGLSPENARALAPLSFSGTAHLSLSALGKLLPHLEEGKSYTQARADAGYAAPPPDRHPKLPPLEEADWRNPVVFRALTQTRKVVNALVRRYGPPWCIHLETARELSQPAKVRRRIETEQQANEKKKQQAEREFLDIVGTAPGPGDLLKMRLWREQGGFCPYCEEYLNPTRLAEPGYAEMDHILPYSRSLDNGWHNRVLVHGKDNRDKGNRTPFEAFGGDTARWDRLVAWVQASHLSAPKKRNLLREDFGEEAERELKDRNLTDTRFITKTAATLLRDRLTFHPEAPKDPVMTLNGRLTAFLRKQWGLHKNRKNGDLHHALDAAVLAVASRSFVYRLSSHNAAWGELPRGREAENGFSLPYPAFRSEVLARLCPTREEILLRLDQGGVGYDEAFRNGLRPVFVSRAPSRRLRGKAHMETLRSPKWKDHPEGPRTASRIPLKDLNLEKLERMVGKDRDRKLYEALRERLAAFGGNGKKAFVAPFRKPCRSGEGPLVRSLRIFDSGYSGVELRDGGEVYAVADHESMVRVDVYAKKNRFYLVPVYVADVARGIVKNRAIVAHKSEEEWDLVDGSFDFRFSLFPGDLVEIEKKDGAYLGYYKSCHRGDGRLLLDRHDRMPRESDCGTFYVSTRKDVLSMSKYQVDPLGEIRLVGSEKPPFVL

SEQ ID NO: 174 - protein, 1023 aa, Helicobacter cinaedi
MKIYSFDIGVASIGWAFIENEVLQDCGIRIFTKAENPKNGASLALPRREARGVRKRLARRRGRLNTIKQLLCKEFGLQLEDYLSNDGELPKAYTASKANPLKSPYELRTLALSQKLDSKDLVRVILHIAKHRGYGNKHAKDSKDTESGKVKKAIEFNRKTLAEKGYRSVGEYLYREFFQQSRISQNNGATEFINVRNKAGNYEHCVAQDMLKEELESILNAQRQFGFSLKQDFENKLLTKIFEQRPLKSFADKVGNCCFIAGEKRAPKDSPSAIEFIALSRTINTLINLSKESGEIYNRAIILQIVESTLKKGEISYKELREIIRLDERLRFKDPRLDYSREIKEAEKVKFLEFKQLKGFKKALGESFTTLAISQLDEIAEHIALIKDRVKLNEKLESYALTKEQREALSNLSFSAHINLSLQALKQILPFMRGDNGEQCLDYDESVEKAGLKALSKDTLKGQMLPPLNEFEPYLSNPVVARALAEYRKVLNVLLKQYGSPHKIHIEYAREAKLSSTERQKYEKEQKDNYAANQAAHKKCQELGLEPSSTNLLKLKLWQEQGGLCLYSGAKITISYLQDPTALQVDHIYPYSRSFDDSYMNKCLVLTKANQEKGNRTPFEAFGTDSAKWGVITTLAQKLPHKKRRRILNTAFNDKEAGFKLRNLNDTSYIARLVADYTETYLEFLPLVESENTTLSKGQKGSKKHIAIVNGVLTSTMRYYLGFASKDRDNHLHHALDAVIIGFMNDSVIKAFSDFKKTQETSKAAYYAHTLSKQEYKKQRAFIQLPSGENFRVSVLEKVESVFVSKPPRKRVRGALHEATFYSPNDPKLLKNYGGTKGVERALALGKMRKVGAKIVSNGAMVRVDIFRHKSSGKFYGVPVYTMDFALGILPNKAVVVGKDQNGVIKDWLEMDSSYEFIFSLYKDDVILVQKKEMQRPELCYFVSFDTSGASIKVAKHDNNFSTLTENQKLLFSNATKEEVVGKSIGIQNLKVFEKWQVSVLGEVKRTQSYPRENISLASKAKK

SEQ ID NO: 175 - protein, 874 aa, Listeria seeligeri
LANGQSEFSWLTRKADGEIRPWNIEEKVDFGKSAIDFIEKMTNKDTYLPKENVLPKHSMCYQKYMVYNELTKIRYTDDQGKTHYFSGQEKQQIFNDLFKQKRKVKKKDLELFLYNMNHVESPTVEGVEDAFNSSFTTYHDLQKVGVPQEILDDPLNTEMLEEIIKILTVFEDKRMINERLQEFSNVLDEAVLKKLERRHYTGWGRLSAKLLIGIRDKESHLTILDYLMNDDKHNRNLMQLINDSNLSFKSIIEKEQVSTADKDIQSIVADLAGSPAIKKGILQSLKIVDELVGIMGYPPQTIVVEMARENQTTGKGKNNSKPRFTSLEKAIKELGSQILKEHPTDNQGLKNDRLYLYYLQNGKDMYTGQELDIHNLSNYDIDHVVPQSFITDNSIDNRVLASSAANREKGDNVPSLEVVRKRKVYWEKLYQAKLMSKRKFDYLTKAERGGLTEADKARFIHRQLVETRQITKNVANILHQRFNCKKDESGNVIEQVRIVTLKAALVSQFRKQFQLYKVREVNDYHHAHDAYLNCVVANTLLKVYPQLEPEFVYGDYHQFDWFKANKATAKKQFYTNIMLFFAKKDRIIDENGEILWDKKYLDTIKKVLNYRQMNIVKKTEIQKGEFSNATANPKGNSSKLIPRKADWDPIKYGGFDGSNMAYAIVIEHEKRKKKTVIKKELIQINIMERTAFEKDQKEFLEGKGYRNPKVITKIPKYTLYECENGRRRMLGSANEAQKGNQMVLPNHLMTLLYHAKNCEASDGKSLAYIESHREMFAELLDSISEFASRYTLADANLEKINTIFEQNKSGDVKVIAQSFVNLLEFNAMGAPASFKYFETNIERKRYNNLKELLNATIIYQSITGLYEARKRLDD

SEQ ID NO: 176 - protein, 1082 aa, Neisseria lactamica
MAAFKPNPMNYILGLDIGIASVGWAMVEIDKEENPIRLIDLGVRVFERAEVPKTGDSLAMARRLARSVRRLTRRRAHRLLRARRLLKREGVLQDADFDENGLVKSLPNTPWQLRAAALDRKLTCLEWSAVLLHLIKHRGYLSQRKNEGETADKELGALLKGVADNAHALQTGDFRTPAELALNKFEKESGHIRNQRGDYSHTFSRKDLQAELNLLFEKQKEFSNPHVSDSLKEGIETLLMAQRPALSGDAVQKMLGHCTFEPAEPKAAKNTYTAERFIWLTKLNNLRILEQGSERPLTDTERATLMDEPYRKSKLTYAQARKLLGLEDTAFFKGLRYGKDNAEAPTLMEMKAYHAISRALEKEGLKDKKSPLNLSTELQDEIGTAFSLFKTDKDITGRLKDRVQPEILEALLKHISFDKFVQISLKALRRIVPLMEQGKRYDEACAEIYGDHYCKKNAEEKIYLPPIPADEIRNPVVLRALSQARKVINCVVRRYGSPARIHIETAREVGKSFKDRKEIEKRQEENRKDREKAAAKFREYFPNFVGEPKSKDILKLRLYEQQHGKCLYSGKEINLVRLNEKGYVEIDHALPFSRTWDDSFNNKVLVLGSENQNKGNQTPYEYFNGKDNSREWQEFKARVETSRFPRSKKQRILLQKFDEEGFKERNLNDTRYVNRFLCQFVADHILLTGKGKRRVFASNGQITNLLRGFWGLRKVRAENDRHHALDAVVVACSTVAMQQKITRFVRYKEMNAFDGKTIDKETGEVLHQKAHFPQPWEFFAQEVMIRVFGKPDGKPEFEEADTPEKLRTLLAEKLSSRPEAVHEYVTPLFVSRAPNRKMSGQGHMETVKSAKRLDEGISVLRVPLTQLKLKGLEKMVNREREPKLYDALKAQLETHKDNPAKAFAEPFYKYDKAGNRTQQVKAVRIEQVQKTGVWVRNHNGIADNATMVRVDVFEKGGKYYLVPIYSWQVAKGILPDRAVVAFKDEEDWTVMDDSFEFRFVLYANDLIKLTAKKNEFLGYFVSLNRATGAIDIRTHDTDSTKGKNGIFQSVGVKTALSFQKNQIDELGKEIRPCRLKKRPPVR

SEQ ID NO: 177 - protein, 1326 aa, Streptococcus pseudoporcinus
MLGTVLFDSGETAQARRLKRTNRRRYTRRRYRLCQLQNIFATEMVKVDDTFFQRLSESFFYYQDKAFDKHPIFGNSKEERAYHKTYPTIYHLRKDLADRDQKADLRLIYLALSHIIKFRGHFLIEGKLNSENTDVQKLFIALVTVYNLLFEEEPIAGETCDAKALLTAKTSKSKRLESLISEFPGQKKNGLFGNLLALALGLRPNFKSNFGLSEDAKLQITKDTYEEELDNLLAEIGDHYADLFLAAKNLSDAILLSDILTLSDENTRAPLSASMIKRYEEHQEDLALLKKLVKEQMPEKYWEIFSNAKKNGYAGYIEGKVSQEDFYRYIKPILSRLKGGDEFLAKIDRDDFLRKQRTFDNGSIPHQIHLKELHAILRRQEKYYPFLAEQKEKIEQLLCFRIPYYVGPLAKGGNSSFAWLKRRSDEPITPWNFKDVVDEEASAQAFIEGMTNYDTYLPEEKVLPKHSPLYEMFTVYNELTKVKYIAENMTKPLYLSAEQKEAIIDHLFKQTRKVTVKDLKEKYFSQIEGLENVDVTGVEGAFNASLGTYNDLLKIIKDKAFLDDEANAEILEEIVLILTLFQDEKLIEKRLAKYANLFEKSVLKKLRKRHYRGWGRLSRQLIDGMKDKASGKTILDFLKADDFANRNFIQLINDSSLDFEKLIDDAQKKAIKRESLTEAVANLAGSPAIKKGILQSLKVVDEIVKVMGHNPDNIVIEMSRENQTTAQGLKNARQRLKKIKEVHKKTGSRILEDNSERITNLTLQDNRLYLYLLQDGKDMYTGQDLDINNLSQYDIDHIIPQSFIKDNSIDNLVLTTQKANRGKSDNVPSIEVVRDMKDRVWRRQLANGAISRQKFDHLTKAERGGLADSDKARFLRRQLVETRQITKHVAQLLDSRFNSKSNQNKKLARNVKIITLKSKIVSDFRKDFGLYKLREVNNYHHAHDAYLNAVVGTALLKKYPKLEAEFVYGDYKHFDLVKLISKSDPSLGKATAKVFFYSNIMNFFKEELSLADGTLMKRPVIETNTETGEVVWDKVKDFKTIRKVLSYPQVNIVKKTEIQSGAFSKESVLSKGNSDKLIERKKGWDPKKYGGFDSPNTAYSIFVVAKVAKRKAQKLKTVKEIVGITIMEQAEYEKDNIAFLEKKGYQDIQEKLLIKLPKYSLFELENGRRRLLASANEFQKGNELALSGKYMKFLYLASRYDKLSSKIESEQQKKLFVEQHLHYFDEILDIVVKHATCYIKAENNLKKIISLYKKKEAYSINEQALNMLNLFIFTSLGAPSTFVFFDETIDRKRYTTSSDVLNGILIQQSITGLYETRIDLSRFGGD

SEQ ID NO: 178 - protein, 1150 aa, Enterococcus faecalis
MYSIGLDLGISSVGWSVIDERTGNVIDLGVRLFSAKNSEKNLERRTNRGGRRLIRRKTNRLKDAKKILAAVGFYEDKSLKNSCPYQLRVKGLTEPLSRGEIYKVTLHILKKRGISYLDEVDTEAAKESQDYKEQVRKNAQLLTKYTPGQIQLQRLKENNRVKTGINAQGNYQLNVFKVSAYANELATILKTQQAFYPNELTDDWIALFVQPGIAEEAGLIYRKRPYYHGPGNEANNSPYGRWSDFQKTGEPATNIFDKLIGKDFQGELRASGLSLSAQQYNLLNDLTNLKIDGEVPLSSEQKEYILTELMTKEFTRFGVNDVVKLLGVKKERLSGWRLDKKGKPEIHTLKGYRNWRKIFAEAGIDLATLPTETIDCLAKVLTLNTEREGIENTLAFELPELSESVKLLVLDRYKELSQSISTQSWHRFSLKTLHLLIPELMNATSEQNTLLEQFQLKSDVRKRYSEYKKLPTKDVLAEIYNPTVNKTVSQAFKVIDALLVKYGKEQIRYITIEMPRDDNEEDEKKRIKELHAKNSQRKNDSQSYFMQKSGWSQEKFQTTIQKNRRFLAKLLYYYEQDGICAYTGLPISPELLVSDSTEIDHIIPISISLDDSINNKVLVLSKANQVKGQQTPYDAWMDGSFKKINGKFSNWDDYQKWVESRHFSHKKENNLLETRNIFDSEQVEKFLARNLNDTRYASRLVLNTLQSFFTNQETKVRVVNGSFTHTLRKKWGADLDKTRETHHHHAVDATLCAVTSFVKVSRYHYAVKEETGEKVMREIDFETGEIVNEMSYWEFKKSKKYERKTYQVKWPNFREQLKPVNLHPRIKFSHQVDRKANRKLSDATIYSVREKTEVKTLKSGKQKITTDEYTIGKIKDIYTLDGWEAFKKKQDKLLMKDLDEKTYERLLSIAETTPDFQEVEEKNGKVKRVKRSPFAVYCEENDIPAIQKYAKKNNGPLIRSLKYYDGKLNKHINITKDSQGRPVEKTKNGRKVTLQSLKPYRYDIYQDLETKAYYTVQLYYSDLRFVEGKYGITEKEYMKKVAEQTKGQVVRFCFSLQKNDGLEIEWKDSQRYDVRFYNFQSANSINFKGLEQEMMPAENQFKQKPYNNGAINLNIAKYGKEGKKLRKFNTDILGKKHYLFYEKEPKNIIK

SEQ ID NO: 179 - protein, 1150 aa, Enterococcus faecalis
MYSIGLDLGVSSVGWSVIDERTGNVIDLGVRLFSAKNSEKNLERRTNRGGRRLIRRKTNRLKDAKKILAAVGFYEDKSLKNSCPYQLRVKGLTEPLSKGEIYKVTLHILKKRGISYLDEDDTEAAKESQDYKEQVRENAQLLTKYTPGQIQLQRLKENNRVKTGINAQGNYQLNVFKVSAYANELATILKTQQAFYPNELTDDWIALFVQPGIAEEAGLIYRKRPYYHGPGNEANNSPYGRWSDFKKTGQPATNIFDKLIGKDFQGELRASGLSLSAQQYNLLNDLTNLKIDGEIPLSPEQKEYILAELMTKEFTRFGINDVAKLLGVKKERLSGWRLDKKGKPEIHTLKGYRNWRKIFAESGIDLATLPTETIDCLAKVLTLNTEREGIENTLAFELPELAESVKLLVLDRYKELSQSVSTQAWHRFSLKTLHLLIPELMNATSEQNTLLEQFQLKSDVRKRYSEYKKLPTKDVLTEIYNPTVNKTVSQAFKVIDALLVKYGKEQIRYITIEMPRDDNEEDEKKRIKELHAKNSQRKNDSQSYFMQKSGWSQEKFQTTIQKNRRFLAKLLYYYEQDGICAYTGLSISPELLVSDSTEIDHIIPISISLDDSINNKVLVLSKANQVKGQQTPYDAWMDGSFKKINGKFSNWDDYQKWVESRHFSHKKENNLLETRNIFDSEQVEKFLARNLNDTRYASRLVLNTLQSFFANQETKVRVVNGSFTHTLRKKWGADLDKTRETHHHHAVDATLCAVTPFVKVSRYHYAVKEETGEKVMREIDFETGEIVDEMSYREFKKSKKYERKTYQVKWPNFREQLKPVNLHPRIKFSHQVDRKANRKLSDATIYSVREKTEVKTLKSGKQKITTDEYTIGKIKDIYTVDGWEAFKKKQDKLLMKDLDEKTYERLLSIAETTPDFQEVEEKNGKVKRVKRSPFAVYCEENDIPAIRKYAKNNNGPLIRSLKYYDGKLNKHINITKDSQGRPVEKTKNGRKVTLQSLKPYRYDIYQDLETKAYYTVQLYYSDLRFVEGKYGITEKEYMKKVAEQTKGQVVRFCFSLQKNDGLEIEWKDSQCYDVRFYNFQSANSINFKGLEQEMMPAENQFKQKPYNNGAINLNIAKYGKEGKKLRKFNTDILGKKHYLYYEKEPKNIIK

SEQ ID NO: 180 - protein, 1345 aa, Streptococcus anginosus
MDQKYSIGLDIGTNSVGWAVVTDDYKVPAKKMKVLGNTDKQSIKKNLLGALLFDSGETAEATRLKRTARRRYTRRRNRLRYLQEIFAEEMNKVDENFFQRLDDSFLVDEDKRGERHPIFGNIAAEVKYHDDFPTIYHLRKHLADISQKADLRLVYLALAHMIKFRGHFLIEGQLKAENTNVQALFKDFVEVYDKTVEESHLSEMTVDALSILTEKVSKSRRLENLIAHYPAEKKNTLFGNLIALSLGLQPNFKTNFQLSEDAKLQFSKDTYEEDLEGLLGEIGDEYADLFASAKNLYDAILLSGILTVDDNSTKAPLSASMVKRYEEHQKDLKKLKDFIKVNAPDQYNAIFKDKNKKGYAGYIENGVKQDEFYKYLKGILLQINGSGDFLDKIDREDFLRKQRTFDNGSIPHQIHLQEMHAILRRQEEHYPFLKENQDKIEKILTFRIPYYVGPLARKGSRFAWAEYKADEKITPWNFDDILDKEKSAEKFITRMTLNDLYLPEEKVLPKHSLLYETFTVYNELTKVKYVNEQGEAKFFDANMKQEIFDHVFKENRKVTKDKLLNYLNKEFEEFRIVNLTGLDKENKAFNSSLGTYHDLRKILDKSFLDDKANEKTIEDIIQTLTLFEDREMIRQRLQKYSDIFTKAQLKKLERRHYTGWGRLSYKLINGIRNKENKKTILDYLIDDGYANRNFMQLINDDALSFKEEIARAQIIGDVDDIANVVHDLPGSPAIKKGILQSVKIVDELVKVMGHNPANIIIEMARENQMTDKGRRNSQQRLKLLQDSLKNLDNPVNIKNVENQQLQNDRLFLYYIQNGKDMYTGETLDINNLSQYDIDHIIPQAFIKDNSLDNRVLTRSDKNRGKSDDVPSIEVVHEMKSFWSKLLSVKLITQRKFDNLTKAERGGLTEEDKAGFIKRQLVETRQITKHVAQILDERFNTEFDGNKRRIRNVKIITLKSNLVSNFRKEFELYKVREINDYHHAHDAYLNAVVGNALLLKYPQLEPEFVYGEYPKYNSYRSRKSATEKFLFYSNILRFFKKEDIQTNEDGEIAWNKEKHIKILRKVLSYPQVNIVKKTEEQTGGFSKESILPKGESDKLIPRKTKNSYWNPKKYGGFDSPVVAYSILVFADVEKGKSKKLRKVQDMVGITIMEKKRFEKHPVDFLEQRGYRNVRLEKIIKLPKYSLFELENKRRRLLASARELQKGNELVIPQRFTTLLYHSYQIEKNYEPEHREYVEKHKDEFKELLEYISVFSRKYVLADNNLTKIEMLFSKNKDAEVSSLAKSFISLLTFTAFGAPAAFNFFGENIDRKRYTSVTECLNATLIHQSITGLYETRIDLSKLGED

SEQ ID NO: 181 - protein, 849 aa, Listeria ivanovii
  misc_feature (780)..(780): Xaa can be any naturally occurring amino acid
LIDKNGTPQHITMIDKMRGKCTYFPEEVRIAKMSYTAELFGLLNDFNNIYFADPETGEKIGFTEADKKYFIDTFIHDQKGVKNITLKQIMKHKNIINETDIFGYRINTKNGTPIFTEFKGLKALKKALKEVDLPDEFYQNTEMMDEIANILSSEKSFTRREEQLKELFLAAFNDELEEAVKELINDITFKEFHSLSKKAIMVILPELWSTNQNQMQLFVQHKMDKSRLENLQNGTKIQFDDEAILSTIAKRAHRETIKIVDAVRAKYGELDYVIVEMAREKNSDEQKKVYNRAQKKQGDFEKEMCKLLGVSELKELRLNGKQHLALKFWKEQDGKCIYSGKPIALSDIVNNFNGLLEIDHIIPISISYDDSQQNKVLCLRSENQRKGQLSPYQYLIRGMGERSFDAFKAEVLSRHFGKKKQNYLLEMEDIANNDELRKHFINRNLVDTRYAMRTFSNTLKTFYTVNGIPTKVMPVNGAMTSALRKRAKLNKDRDAGHAHHAIDALIVAAIGRLPLIKQLAELRVNEEGEFADKITDKGLDDKTAFDDKTLKFLRNLLNYESKVKYSHKVDRKPNRSLSKQTLYSTREKDGEKYIIGKVKNIYTLDKAGYAALKKRIDKNPEDFLMAQHNPKTWEEIIKIMEVYSKADNPFKEFYDEHGFIMKDGKVPVKSLRYHDKKLGIHVPLTHKYENTRHDVVLLKRNSLRVDIYMNKEGVYKYQGVPYNWFNQKGDKYILDMEKYHNEIDGTRASFKNIDNTFEFQFSLYKNDVFSYMKKDKEGEXVSYTKLFRSDSSPRENRLEVENIDMRTSSQQMPTINPLKNLIKYNTDILGNTYPIQKEKFVTVFTLHSK

SEQ ID NO: 182 - protein, 1457 aa, Prevotella buccae
MKTILGLDLGTNSIGWAKVSVDDYGNYLHDIKLGSRIIPMSQDVLGNFDSGVTVSQTAQRTEFRSKRRLVQRNLQRRERLHRVLHVLDFLPAHYDAAIGWDRTEAVTYGKFLNHAEPKLAWEELGNGKRRFLFMDSFHEMVADFARCQPALVADGKKIPLDWTIYYLRKKALTQAITKEELAWILLNFNQKRGYYQLRGEEEEENPTKQEEYYELKVVSVEATDSRKGNDTWYNVHLENGWIYRRSSKISLDDWVGKVKQFIVTTEYEKDGATLKTDKEGYVKRSFRAPNENDWGLRKKRTETLLEMSGKTVGAFIYDHLLQEPADKIRGNFIRTIERHYYKAELEAILAEQCKYHIELRDKEMLEACARELYLNNLPHQRSLMKKDMTYLLLYDLIFYQRPLKSKKALIANCPYEYYEYVDKETGEIKRQNIKCIAKSNPYFQEFRLWQFVLNLRLFDRVEDKEVTANYLPTADDHARLFTYLNDRKEINQETLLKDYFKLKKVKIGNEKEYPIRWNYIEDKEKKYPCNETRYELLMALDRAGIEHKWLDDNNLEYRLWHLLYSVEVKSESETALRKLKNDDAFVNSFLKVKPFKKEYGAYSEKAIKRLLAVMRKGFLWNEQDICDETRKRIEIIIKGDVDEKVKERMGHAAYSFDRVSDFQGLPEWLACYVVYGRHSEAMDIQHWDSPERLMAYINNFKQYSLRNPIVEQCILETLRTVHDIWKETGQIDEIHVELGREMKSTSEERARRTQNVLRNENTNLRIKSLLIELKNDTDICNVHPYSPMQQEILRIYEEGALQELNREDEDFEEISKISQMSQPSGKELNRYKLWLEQKYRSPYTGKAISLAKLFTPAYQIEHVIPQSRYFDDSFTNKVICEAEVNTLKSNLLGYEFIKKHGGEIIHCTTLGDVRIFSESEYKAFVMDHYANNKSKKDKLLMEDIPQEFLSRQMNDSRYISKVVKTLLSNIVRMADESEATSKSVIVCTGGVTDRLKKDWGLNDVWNSIVYSRFERLNRLTGTEAFGHWENKDGKRVFQTSMPLELQRGFRKKRIDHRHHAMDALVIACASRNIVNYLNNESANNPKKREDLRRQLCDKNRVIRKPWETFTQDAYNALENVVVSFKNYVRVINKATNRYEHYDENGKKRFVQQKGSELWAIRKPMHKETYYGHVNLRRKELVTLQKALDDIPSICDKKLRDYISALVEKHFNKRQLLAHFKSTDYYWQKQYVNKVYVWTFSDDIKPLVATRKLLDTSFDAKRIGTITDTGIQKILRNYLEAKGGNATLAFTPEGIAEMNQNISKYNDGKPHQPILKVRITEPMGAKYRVGQTGNKMAKYVEAQSGTNLYFAIYEDSEGKRSYTTVPLDEVAERLKQRLSPVPEKDENDVPLKFYLSPNDLVYVPTEEELQLRECKLNKDRIYKMVSSTGNECHFIPYYVANVIYNKGGFNMQMHRPQS

SEQ ID NO: 183 - protein, 1330 aa, Enterococcus italicus
MKNDYTIGLDIGTNSVGYSVVTDDYKVISKKMNVFGNTEKKSIKKNFWGVRLFESGQTAQEARMKRTSRRRIARRKNRICYLQEIFQPEMNHLDNNFFYRLNESFLVADDAKYDKHPIFGTLDEEIHFHEQFPTIYHLRKYLADGDEKADLRLVYLAIAHIIKFRGNFLIEGELNTENNSVIELSKVFVQLYNQTLSELEGFQFIDESIDFSEVLTQQLSKSERADNVLKLFPDEKGTGIFAQFIKLIVGNQGNFKKVFQLEEDQKLQLSTDDYEENIENLLAIIGDEYGDIFVAAQNLYQAILLAGILTSTEKTRAKLSASMIQRYEEHAKDLKLLKRFVKEHIPDKYAEIFNDATKNGYAGYIDGKTKEEEFYKYLKTTLVQKSGYQYFIEKIEQENFLRKQRIYDNGVIPHQVHAEELRAILRKQEKYYSFLKENHEKIEQIFKVRIPYYVGPLAKHNEQSRFAWNIRKSDEPIRPWNMNDVVDENASAVAFIERMTIKDIYLNENVLPRHSLIYEKFTVFNELTKVLYADDRGVFQRFSAEEKEDIFEKLFKSERKVTKKKLENYLRIELSISSPSVKGIEEQFNANFGTYLDLKKFDELHPYLDDEKYQDTLEEVIKVLTVFEDRSMIQNQLEQLPLNLSTKTIKALSRRKYTGWGRLSARLIDGIHDKNSGKTILDYLIEDESDSYIVNRNFMQLINDDHLSFKKIIEDSQPYKEQQSAEEIVSELSGSPAIKKGILQSLKIVDELVAIMGYKPKNIVVEMARENQTTGRGKQNSKPRLKGIENGLKEFSDSVLKGSSIDNKQLQNDRLYLYYLQNGKDMYTGHELDIDHLSTYDIDHIIPQSFLTDNSIDNRVLTTSKSNRGKSDNVPSEEVVRKMDRFWRKLLNAKLISERKYTNLTKKELTESDKAGFLKRQLVETRQITKHVATILDSKFNEDSNNRDVQIITLKSALVSEFRKTFNLYKVREINDLHHAHDAYLNAVVALSLLRVYPQLKPEFVYGEYGKNSIHDQNKATIKKQFYSNITRYFASKDYIINDDGEILWNKQETIAQVIKTLGMHQVNVVKKVEIQKGGFSKESIQPKGESQKLIRRKQQWNTKKYGGFDSPVVAYAILLSFDKGKRKARSFKIVGITIQDRESFEGNPILYLSKKDYHNPKVEAILPKYSLFEFENGRRRMVASASETQKGNQLIIPGHLMELLYHSKKIINGKNSDSVSYIQNNKEKFREIFEYIVDFSSKYISADANLNKIEKIFENNFHKASEQEIAKSFINLLTFTAMGAPADFEFFGEKIPRKRYVSISEIIDAVFIHQSITGLYETRVRLTEV

SEQ ID NO: 184 - protein, 1123 aa, Mobiluncus curtisii
MFVYLNSPRGFGPATFLTDLPHFCIIFGNNDFMDNRKYHVGIDVGTNSVGFAAVEVGDSGSPIRFLNTMVVIHDSGVDPEQKKYAITRLASAGTARRTRRLYRTRRQRLRELDDFISNELGYPLVNLENFADPYEPWKVRADLATIKLPADELPEAMSIALRHMARHRGWRSPYQRVEALHLHAEISEEFSALKKRVMEKTGDVFSDDATPAEVLVDLMGRQKIRGADGMLSGKLRQSDNANELRKIASVQGIDDETLNRIIDRVFFSRSPKGKASERVGMDALPGQGSKPRALKAMPSFQKFRIVSVICNLRIKDSGDDNRPLSMEEKEQLIGYLMSSTTDDHVTWTDVAELLHVKRSNLQGTAKEGPDGERPYTRPPVNSAWSKIKDSKIKSLVALWKTGDVDVQSAIVEALSNASVLEDARPGADIVVAYLESLDDKELESLDKVGLPAGRASYSEDSLERLTERMLQDDCDLFEARKREFGVSDDWKPPADPIYAPVGNPGVDRVLKIVNRLLMAAEREWGAPTQINIEHVRSGFSSELMQREFERENERRRAQNEEAVKAILTEKGGNSHVSKYDIIRYYAVKRQNCQCLYCGTPITFSDCELDHIVPRKGVGSTNSRVNLAAACRSCNRDKSNLPFAVWAGKTSNFDVSIDGAVSRVKQWQRSQNEGAREFRAFQNEVISRLLKTTEDPEIDSRSLESVAWMARELHHRVEYYFQSKGAQTQVSVYRGAVTAQARKSSGLEDKVKMIGGGGKTRLDRRHHAMDAATIALMTPGISTTLSEKNNLRDAQKFTGQSETWKDYCGRTETAREHFAVWKSNMERLTDLFNDKLENDAIPVVQPLRLRLSDSKAHDDGIGKLDSKKLGSVWSLADIDRAATPQIWTALTRCDDFDPTKGLPENANRVIRAQGVKYESEDNIPVFPSNVAAIAVRDGYAEIGSTIHHARIYRIDDGKKIFYSMIRVFAVDLLKHQAEDLFTVKLPPSAISIRTCEDSLRRALSNGTAEYLGWLVPGDEIIVDTSDKAFHTGQIGDLLRNFPVNSFRLTGFPSNSRLRLKPVLLAGEGLRDDAEDSIKKILSGQGWRPAINVLFSKGKPRIVRRNSLGIERPSSNNGLPFSWEA

SEQ ID NO: 185 - protein, 1054 aa, Staphylococcus lugdunensis
MNQKFILGLDIGITSVGYGLIDYETKNIIDAGVRLFPEANVENNEGRRSKRGSRRLKRRRIHRLERVKKLLEDYNLLDQSQIPQSTNPYAIRVKGLSEALSKDELVIALLHIAKRRGIHKIDVIDSNDDVGNELSTKEQLNKNSKLLKDKFVCQIQLERMNEGQVRGEKNRFKTADIIKEIIQLLNVQKNFHQLDENFINKYIELVEMRREYFEGPGKGSPYGWEGDPKAWYETLMGHCTYFPDELRSVKYAYSADLFNALNDLNNLVIQRDGLSKLEYHEKYHIIENVFKQKKKPTLKQIANEINVNPEDIKGYRITKSGKPQFTEFKLYHDLKSVLFDQSILENEDVLDQIAEILTIYQDKDSIKSKLTELDILLNEEDKENIAQLTGYTGTHRLSLKCIRLVLEEQWYSSRNQMEIFTHLNIKPKKINLTAANKIPKAMIDEFILSPVVKRTFGQAINLINKIIEKYGVPEDIIIELARENNSKDKQKFINEMQKKNENTRKRINEIIGKYGNQNAKRLVEKIRLHDEQEGKCLYSLESIPLEDLLNNPNHYEVDHIIPRSVSFDNSYHNKVLVKQSENSKKSNLTPYQYFNSGKSKLSYNQFKQHILNLSKSQDRISKKKKEYLLEERDINKFEVQKEFINRNLVDTRYATRELTNYLKAYFSANNMNVKVKTINGSFTDYLRKVWKFKKERNHGYKHHAEDALIIANADFLFKENKKLKAVNSVLEKPEIESKQLDIQVDSEDNYSEMFIIPKQVQDIKDFRNFKYSHRVDKKPNRQLINDTLYSTRKKDNSTYIVQTIKDIYAKDNTTLKKQFDKSPEKFLMYQHDPRTFEKLEVIMKQYANEKNPLAKYHEETGEYLTKYSKKNNGPIVKSLKYIGNKLGSHLDVTHQFKSSTKKLVKLSIKPYRFDVYLTDKGYKFITISYLDVLKKDNYYYIPEQKYDKLKLGKAIDKNAKFIASFYKNDLIKLDGEIYKIIGVNSDTRNMIELDLPDIRYKEYCELNNIKGEPRIKKTIGKKVNSIEKLTTDVLGNVFTNTQYTKPQLLFKRGN

SEQ ID NO: 186 - protein, 586 aa, Pseudoramibacter alactolyticus
MTYYLGLDMGTGSVGWAATDKNYKLIRAKGKDLWGVRLFQTAKTAAERRSHRVARLRRQREKVRIGYLKTIFSDAINKVDPGFFQRLDDSFFYAEDKNINQPYALFADTGYTDVDYYRDYPTIFHLRSTLIHDTSPKDVRLVYLAVLNMFKHRGHFLASNLSENGVDDFGDIYQQWCKSVPKPVQISDPEAKTEKIENILSKAGISNTRRLEALLEVFGIKRRDAFAEVLKLWCGLKGNLSKIWSETDFSDLDNTKPALSFKDSNLDMVLSQLEEILPDEDYSWLMLTKQIYDWSLLSGMMKDASGKSYDYLSDARVASYQKHSEDLKTLKRFYHDNHLSAAYDQMFRVMGKDNYSAYAGSVQSKKEVVRRGASCGIEELYKRIKKDLKPVPDCETKQIILENIERGTFLPKQLTRDNGVIPNQIHVHELKAILKNAENYLPFLKEGSELTNSEKILQLFQFQIPYYVGPLYSDENNYAWVVRKEGGRVFPWNFAEKVDEKASAEGFISELVARCTYLDNEKVLPKASLLYEKFMVLNELNNLRINGERISVDIKQELYQNLFTRGKKVTLKKSEGLFGGQRIFCL

SEQ ID NO: 187 - protein, 1385 aa, Gemella morbillorum
MKNKTWYLGLGVGPTSIGWAATDSNYKLLRKNKKRLWGVRLFEEAKTAVDRRTFRAERRRLARRKWRISLLEELFAKEVSKNDPNFFLRLKESKYHFEDKSLMNEYILFNDKDYTDKDYYKEYPTIYHLRLSLTTEENPDIRKVYLAVHSMLKNRGHFLLQGQSFNDSNIDSVIKELLELETVKINFEVTDEVIHSLKKIALEKKNLSDKNNDVKKLYPKEKQLQEIFKLVFGGKTSLDKLYDIEEYKELDNSVKSISFKEKVYEEVRPDYEQILSNYIELLDLAKLVYDSIVLADIKKEGKTISESKVELYNKHKDDLANLKKLVKIDSKLSEDKKKEVYFTIFKEDKEKGTNYVNYTHRSQEGKSCSYEDFKKFLKKELEKLEDSPTKTTILEELDLETFLPLQRTKDNSVVPYQIHKEELVKILDNAAKYHSFLAEKDDSGYSTREKVVQLFEFRIPYYIGPLNAHHNTENGGYSWAIRKKGMESVPVTPWNFKDVIDESASAEAFVNNLKNKCAYLSGEDVLPKNSLLYSEYALLNELNALRYEGNRISVEARDVIVTKLFKEQGKKVTKKTIKELLKTEGFIDGKGEIVGIDNIVKNDLKSYRDFKKILADKFDKERVENIILWITLYGESRKLIKEKITKVYGDFYTVDEIEKMSRLTYKDWGILSRKLLTELVSEKLYNEETGECLNIIGAMRQGTILFMELLADKFDYMSQIKNHNKENKDDITEITPDILENLHASPAVKRSIWQTVRIVEELKTIIGCVPTKIFIETTKRNNAPYKVPTLNRNDLVTKYKTIREHEIFELEKELKNTLDFTLNKNRLINEEPSKLKATKLYLYYTQLGRCMYTGKKIDLGELFDNNNKYDIDHIYPQSKVKDGSFNNIVLVTKASNDMKADVFPLKSKFQTKENKIFWRFLKEKKLITEEKYNRLVRTEEFSNGELTGFITRQLVETSQAIKVISNVLRELNPETTICYSKAENVSSFRQSFGKIKEANRKAENNEKLIRVQEINDYYNAKDAYLSIVVGNVYDVKFTRNVHNFIKNNKDARRYSLNGLFYTDVKNANTIAWEMDKTVHVVEKTMNNNNILITRRTSEQKGALYDATLYKAKVAEKAKEGTYYPLKTTDSKIKDVGKYGGFTKIKIAYYSIFEYTLDGKKGKQKITRIVPIPIYISQNIKDDKALLEYAQTRLPGKDLKIKYRKLCIGSLVKINNFNYYIGGKTNNNFTFDSAVQVILDKDSESYIKELAKYLNWKKENKDGKLWESITEDKNIQLYDSLVKKMNTGIFIRKTPNKYTELLTLEVKNKFINIDIDEQVKLLLEILNLLTNKKFTSKLNEIGITASRGVCSFNLSNQSQFSIIEQSVTGVYEKEKLIIEKKKEGIL

SEQ ID NO: 188 - protein, 1029 aa, Alicycliphilus denitrificans
MRSLRYRLALDLGSTSLGWALFRLDACNRPTAVIKAGVRIFSDGRNPKDGSSLAVTRRAARAMRRRRDRLLKRKTRMQAKLVEHGFFPADAGKRKALEQLNPYALRAKGLQEALLPGEFARALFHINQRRGFKSNRKTDKKDNDSGVLKKAIGQLRQQMAEQGSRTVGEYLWTRLQQGQGVRARYREKPYTTEEGKKRIDKSYDLYIDRAMIEQEFDALWAAQAAFNPTLFHEAARADLKDTLLHQRPLRPVKPGRCTLLPEEERAPLALPSTQRFRIHQEVNHLRLLDENLREVALTLAQRDAVVTALETKAKLSFEQIRKLLKLSGSVQFNLEDAKRTELKGNATSAALARKELFGAAWSGFDEALQDEIVWQLVTEEGEGALIAWLQTHTGVDEARAQAIVDVSLPEGYGNLSRKALARIVPALRAAVITYDKAVQAAGFDHHSQLGFEYDASEVEDLVHPETGEIRSVFKQLPYYGKALQRHVAFGSGKPEDPDEKRYGKIANPTVHIGLNQVRMVVNALIRRYGRPTEVVIELARDLKQSREQKVEAQRRQADNQRRNARIRRSIAEVLGIGEERVRGSDIQKWICWEELSFDAADRRCPYSGVQISAAMLLSDEVEVEHILPFSKTLDDSLNNRTVAMRQANRIKRNRTPWDARAEFEAQGWSYEDILQRAERMPLRKRYRFAPDGYERWLGDDKDFLARALNDTRYLSRVAAEYLRLVCPGTRVIPGQLTALLRGKFGLNDVLGLDGEKNRNDHRHHAVDACVIGVTDQGLMQRFATASAQARGDGLTRLVDGMPMPWPTYRDHVERAVRHIWVSHRPDHGFEGAMMEETSYGIRKDGSIKQRRKADGSAGREISNLIRIHEATQPLRHGVSADGQPLAYKGYVGGSNYCIEITVNDKGKWEGEVISTFRAYGVVRAGGMGRLRNPHEGQNGRKLIMRLVIGDSVRLEVDGAERTMRIVKISGSNGQIFMAPIHEANVDARNTDKQDAFTYTSKYAGSLQKAKTRRVTISPIGEVRDPGFKG

SEQ ID NO: 189 - protein, 1422 aa, Sutterella wadsworthensis
MTQSERRFSCSIGIDMGAKYTGVFYALFDREELPTNLNSKAMTLVMPETGPRYVQAQRTAVRHRLRGQKRYTLARKLAFLVVDDMIKKQEKRLTDEEWKRGREALSGLLKRRGYSRPNADGEDLTPLENVRADVFAAHPAFSTYFSEVRSLAEQWEEFTANISNVEKFLGDPNIPADKEFIEFAVAEGLIDKTEKKAYQSALSTLRANANVLTGLRQMGHKPRSEYFKAIEADLKKDSRLAKINEAFGGAERLARLLGNLSNLQLRAERWYFNAPDIMKDRGWEPDRFKKTLVRAFKFFHPAKDQNKQHLELIKQIENSEDIIETLCTLDPNRTIPPYEDQNNRRPPLDQTLLLSPEKLTRQYGEIWKTWSARLTSAEPTLAPAAEILERSTDRKSRVAVNGHEPLPTLAYQLSYALQRAFDRSKALDPYALRALAAGSKSNKLTSARTALENCIGGQNVKTFLDCARRYYREADDAKVGLWFDNADGLLERSDLHPPMKKKILPLLVANILQTDETTGQKFLDEIWRKQIKGRETVASRCARIETVRKSFGGGFNIAYNTAQYREVNKLPRNAQDKELLTIRDRVAETADFIAANLGLSDEQKRKFANPFSLAQFYTLIETEVSGFSATTLAVHLENAWRMTIKDAVINGETVRAAQCSRLPAETARPFDGLVRRLVDRQAWEIAKRVSTDIQSKVDFSNGIVDVSIFVEENKFEFSASVADLKKNKRVKDKMLSEAEKLETRWLIKNERIKKASRGTCPYTGDRLAEGGEIDHILPRSLIKDARGIVFNAEPNLIYASSRGNQLKKNQRYSLSDLKANYRNEIFKTSNIAAITAEIEDVVTKLQQTHRLKFFDLLNEHEQDCVRHALFLDDGSEARDAVLELLATQRRTRVNGTQIWMIKNLANKIREELQNWCKTTNNRLHFQAAATNVSDAKNLRLKLAQNQPDFEKPDIQPIASHSIDALCSFAVGSADAERDQNGFDYLDGKTVLGLYPQSCEVIHLQAKPQEEKSHFDSVAIFKEGIYAEQFLPIFTLNEKIWIGYETLNAKGERCGAIEVSGKQPKELLEMLAPFFNKPVGDLSAHATYRILKKPAYEFLAKAALQPLSAEEKRLAALLDALRYCTSRKSLMSLFMAANGKSLKKREDVLKPKLFQLKVELKGEKSFKLNGSLTLPVKQDWLRICDSPELADAFGKPCSADELTSKLARIWKRPVMRDLAHAPVRREFSLPAIDNPSGGFRIRRTNLFGNELYQVHAINAKKYRGFASAGSNVDWSKGILFNELQHENLTECGGRFITSADVTPMSEWRKVVAEDNLSIWIAPGTEGRRYVRVETTFIQASHWFEQSVENWAITSPLSLPASFKVDKPAEFQKAVGTELSELLGQPRSEIFIENVGNAKHIRFWYIVVSSNKKMNESYNNVSKS

SEQ ID NO: 190 - protein, 1132 aa, Nitratifractor salsuginis
MKKILGVDLGITSFGYAILQETGKDLYRCLDNSVVMRNNPYDEKSGESSQSIRSTQKSMRRLIEKRKKRIRCVAQTMERYGILDYSETMKINDPKNNPIKNRWQLRAVDAWKRPLSPQELFAIFAHMAKHRGYKSIATEDLIYELELELGLNDPEKESEKKADERRQVYNALRHLEELRKKYGGETIAQTIHRAVEAGDLRSYRNHDDYEKMIRREDIEEEIEKVLLRQAELGALGLPEEQVSELIDELKACITDQEMPTIDESLFGKCTFYKDELAAPAYSYLYDLYRLYKKLADLNIDGYEVTQEDREKVIEWVEKKIAQGKNLKKITHKDLRKILGLAPEQKIFGVEDERIVKGKKEPRTFVPFFFLADIAKFKELFASIQKHPDALQIFRELAEILQRSKTPQEALDRLRALMAGKGIDTDDRELLELFKNKRSGTRELSHRYILEALPLFLEGYDEKEVQRILGFDDREDYSRYPKSLRHLHLREGNLFEKEENPINNHAVKSLASWALGLIADLSWRYGPFDEIILETTRDALPEKIRKEIDKAMREREKALDKIIGKYKKEFPSIDKRLARKIQLWERQKGLDLYSGKVINLSQLLDGSADIEHIVPQSLGGLSTDYNTIVTLKSVNAAKGNRLPGDWLAGNPDYRERIGMLSEKGLIDWKKRKNLLAQSLDEIYTENTHSKGIRATSYLEALVAQVLKRYYPFPDPELRKNGIGVRMIPGKVTSKTRSLLGIKSKSRETNFHHAEDALILSTLTRGWQNRLHRMLRDNYGKSEAELKELWKKYMPHIEGLTLADYIDEAFRRFMSKGEESLFYRDMFDTIRSISYWVDKKPLSASSHKETVYSSRHEVPTLRKNILEAFDSLNVIKDRHKLTTEEFMKRYDKEIRQKLWLHRIGNTNDESYRAVEERATQIAQILTRYQLMDAQNDKEIDEKFQQALKELITSPIEVTGKLLRKMRFVYDKLNAMQIDRGLVETDKNMLGIHISKGPNEKLIFRRMDVNNAHELQKERSGILCYLNEMLFIFNKKGLIHYGCLRSYLEKGQGSKYIALFNPRFPANPKAQPSKFTSDSKIKQVGIGSATGIIKAHLDLDGHVRSYEVFGTLPEGSIEWFKEESGYGRVEDDPHH

SEQ ID NO: 191 - protein, 1327 aa, Solobacterium moorei
MEGQMKNNGNNLQQGNYYLGLDVGTSSVGWAVTDTDYNVLKFRGKSMWGARLFDEASTAEERRTHRGNRRRLARRKYRLLLLEQLFEKEIRKIDDNFFVRLHESNLWADDKSKPSKFLLFNDTNFTDKDYLKKYPTIYHLRSDLIHNSTEHDIRLVFLALHHLIKYRGHFIYDNSANGDVKTLDEAVSDFEEYLNENDIEFNIENKKEFINVLSDKHLTKKEKKISLKKLYGDITDSENINISVLIEMLSGSSISLSNLFKDIEFDGKQNLSLDSDIEETLNDVVDILGDNIDLLIHAKEVYDIAVLTSSLGKHKYLCDAKVELFEKNKKDLMILKKYIKKNHPEDYKKIFSSPTEKKNYAAYSQTNSKNVCSQEEFCLFIKPYIRDMVKSENEDEVRIAKEVEDKSFLTKLKGTNNSVVPYQIHERELNQILKNIVAYLPFMNDEQEDISVVDKIKLIFKFKIPYYVGPLNTKSTRSWVYRSDEKIYPWNFSNVIDLDKTAHEFMNRLIGRCTYTNDPVLPMDSLLYSKYNVLNEINPIKVNGKAIPVEVKQAIYTDLFENSKKKVTRKSIYIYLLKNGYIEKEDIVSGIDIEIKSKLKSHHDFTQIVQENKCTPEEIERIIKGILVYSDDKSMLRRWLKNNIKGLSENDVKYLAKLNYKEWGRLSKTLLTDIYTINPEDGEACSILDIMWNTNATLMEILSNEKYQFKQNIENYKAENYDEKQNLHEELDDMYISPAARRSIWQALRIVDEIVDIKKSAPKKIFIEMAREKKSAMKKKRTESRKDTLLELYKSCKSQADGFYDEELFEKLSNESNSRLRRDQLYLYYTQMGRSMYTGKRIDFDKLINDKNTYDIDHIYPRSKIKDDSITNRVLVEKDINGEKTDIYPISEDIRQKMQPFWKILKEKGLINEEKYKRLTRNYELTDEELSSFVARQLVETQQSTKALATLLKKEYPSAKIVYSKAGNVSEFRNRKDKELPKFREINDLHHAKDAYLNIVVGNVYDTKFTEKFFNNIRNENYSLKRVFDFSVPGAWDAKGSTFNTIKKYMAKNNPIIAFAPYEVKGELFDQQIVPKGKGQFPIKQGKDIEKYGGYNKLSSAFLFAVEYKGKKARERSLETVYIKDVELYLQDPIKYCESVLGLKEPQIIKPKILMGSLFSINNKKLVVTGRSGKQYVCHHIYQLSINDEDSQYLKNIAKYLQEEPDGNIERQNILNITSVNNIKLFDVLCTKFNSNTYEIILNSLKNDVNEGREKFSELDILEQCNILLQLLKAFKCNRESSNLEKLNNKKQAGVIVIPHLFTKCSVFKVIHQSITGLFEKEMDLLK

SEQ ID NO: 192 - protein, 738 aa, Treponema phagedenis
MLQELFAKEIAKIDEGFFRRLDESAFYLEDKSLKQKYSLFNDDNFTDKDYYKKFPTIHHLIKALINDETHVDIRLLYLACHTIIKNRGHFLFEGKEFNTESRFDDAINELFSYLRQDMEIDFAFEDKIADIKEILENKKIGMRDKQNALNKKLSIAPKDKQKKEIIKLIVGASFNLKTLFNDEKYSSEKESYSFAKSNYEEKEAVLESLLGDGFGLILRAKAVYDSSVLSEILGNETYLSFAKVKIYDKHKEDLAKLKKVIKTYHADEFKKVFAEANIQGNYCSYVGSCKKNGKKVPIEKRADKDAFYDFLKKILKDEKAKNSDADYAFILNEIELKTFLPKQVSKKNANIPYQLRRMELEKIVNNAEKYFSFLSEKDEYGTVKEKIIQLLTFKRPYYIGIIQDTHKEKFPDRCWVVKKENAKNEKITPWNFYDHIDEDKTAEAFITSRTNKCTYLIGEDVLPRNSLLYMEYTVLNELNNLKVSVDGVNIFDVKLKKKIYEQVFKQRKEVSKKTIADFLKKEGICKKENDVVITGIDEKCTTSLKLYIDIKKIIGKRIEEEPTKNALEDIILWASIYDEGEGRKILEAKIQSVYPDVFTQDELNKILKLKISGWGRFSRKFLESIVASFPGFTDTINIITAMRETNFNLMELLGDAYGFSKGIEKFNSKFNDDKKVFSYDKLVKDLYLSPSVKRMLWRALVIVKEVKSIMGKDPKKYLLKWQEEKKLKREGLPPAMQV

SEQ ID NO: 193 - protein, 1377 aa, Streptococcus equinus
MEKTYSIGLDIGTNSVGWAVITDDYKVPAKKMKVLGNTDKKYIKKNLLGALLFDSGETAEATRLKRAARRRYTRRKNRLRYLQEIFAKEMAKVDESFFQRLEESFLTDDDKTFDSHPIFGNKAEEDTYHQEFPTIYHLRKHLADSPEKVDLRLVYLALAHMIKFRGHFLIEGQLNAENTDVQKIFADFVGVYDRTFDDSHLSEITVDAASILTEKISKSRRLENLIKQYPTEKKNTLFGNLVALALGLQPNFKTNFKLSEDAKLQFSKDTYDEDLEELLGKIGDDYADLFTAAKNLYDAILLSGILTVDDNSTKAPLSASMIKRYEEHHEDLEKLKTFIKVNNFDKYHEIFKDKSKNGYAGYIENGVKQDIFYKHLKSIISEKNGGQYFLDKIEREDFLRKQRTFDNGSIPYQIHLQEMRTILRRQGEYYPFLKENQAKIEKILTFRIPYYVGPLARKNSRFAWAKYHSDEPITPWNFDEVVDKEKSAEKFITRMTLNDLYLPEEKVLPKHSYVYETFAVYNELTKIKYVNEQGKSFFFDANMKQEIFDHVFKENRKVTKAKLLSYLNNEFEEFRINDLIGLDKDSKSFNASLGTYHDLKKILDKSFLDDKTNEQIIEDIVLTLTLFEDRDMIHERLQKYSDIFTSQQLKKLERRHYTGWGRLSYKLINGIRNKENNKTILDFLIDDGDANRNFMQLINDDSLSFKTTIQEAQVVGDVDDIEAVVHDLPGSPAIKKGILQSVKIVDELVKVMGHNPQNIVIEMARENQITGYGRNRSNQRLKRLQDSLKEFGSDILSKKKPSYVDSKVENSHLQNDRLFLYYIQNGKDMYTGEELDIDHLSDYDIDHIIPQAFIKDNSIDNRVLTSSAKNRGKSDDVPSIEIVRNRKSYWYKLYKSGLISKRKFDNLTKAERGGLTETDKAGFIKRQLVETRQITKHVAQILDARFNTKCDENDKVIRDVKVITLKSSLVSQFRKEFKFYKVREINDYHHAHDAYLNAVVGTALLKKYPKLAPEFVYGEYKKYDVRKLVAKSSDNHSELGKATAKYFFYSNLMNFFKTEVKYADGRVFERPDIETNADGEVVWNKQRDFNIVRKVLSYPQVNIVKKVEVQTGGFSKESILPKGDSDKLIPRKTKKLQWETQKYGGFDSPTVAYSVLVVADVEKGKTRKLKTVKELVGISIMERSSFEENPVSFLEKKGYHNVQEDKLIKLPKYSLFEFEGGRRRLLASATELQKGNEVVLPQYMVNLLYHSQHVNNSHKPEHLNYVKQHKDEFKDIFNLIISIARINILKPKVVDNLINEFTEYGQEDISSLSESFINLLKFISFGAPGAFKFLKLDVKQSNLRYKSTTEALSATLIHQSVTGLYETRIDLSKLGEE

SEQ ID NO: 194 - protein, 1128 aa, Streptococcus vestibularis
MSDLVLGLDIGIGSVGVGILNKVTGEIIHKNSRIFPAAQAENNVERRTNRQGRRLTRRKKHRRVRLNHLFEESGLITDFTKVSINLNPYQLRVKGLIDELSNEELFIALKNMVKHRGISYLDDASDDGNSSVGDYAQIVKENSKQLETKTPGQIQLERYQKYGQLRGDFTVEEDGKKHRLINVFPTSAYRSEALRILQTQKEFNPQITDEFINRYLEILTGKRKYYHGPGNEKSRTDYGRYTTKKDSENEYITLDNIFGILIGKCTFYPEEYRAAKASYTAQEFNLLNDLNNLTVPTETKKLSEEQKNQIINYVKNEKAMGPAKLFKYIAKLLSCDVADIKGYRIDKSDKAEIHTFEAYRKMKTLETIDFEKMSRDQLDKLAYVLTLNTEREGIQEALDHEFADGNFSQEQIDELVQFRKANSSIFGKGWHNFSVKLMMELIPELYATSEEQMTILTRLGKQKTTSSSNKTKYIDEKLLTEEIYNPVVAKSVRQAIKIVNAAIKEYGDFDNIVIEMARETNEDDEKKAIQKIQKANKDEKDAAMLKAANQYNGRAELPHSVFHGHKQLATKIRLWHQQGERCLYTGKTISIHDLINNPNQFEIDHILPLSITFDDSLANKVLVYATANQEKGQRTPYQALDSMDDAWSFRELKAFVRESKSLSNKKKEYLLTEEDISRFDVRKKFIERNLVDTRYASRVVLNALQEHFRAHKTDTKVSVVRGQFTSQLRRHWGIEKTRDTYHHHAVDALIIAASSQLNLWKKQKNTLVNYSENQLLDIETGELISDDEYKESVFKAPYQHFVDTLKSKEFEDSILFSYQVDSKFNRKISDATIYATRQAKVGKDKKDETYVLGKIKDIYSQTGYDAFIKIYQKDKSKFLMYRHDPQTFEKVIEPILENYPNKEMNEKGKEVPCNPFLKYKEEHGDYIRKYSKKGNGPEIKSLKYYDSKLGNHIDITPKDSNNKVVLQSVSPWRADVYFNKTTGKYEILGLKYADLQFEKGTGTYKISQEKYNVIKKKEGVDSDSEFKFTLYKNDLLLIKDTETKEQQLFRFLSRTKPNVKHYVELKPYDKQKFEGNESLINVLGAVAKGGQCQKGINKPNISIYKVRTDVLGNQHIIKNEGDKPKLDF

SEQ ID NO: 195 - protein, 1080 aa, Methylocystis sp.
MRVLGLDGGIASIGWALIEIFEDHEPSDGRIIDTGAWMFDAPEEKSQTGTKLKSELRRIFRGQRRVIRRRRQRMNEVRRILHRHGLLSSDNRDALKQPGLDPWKIRAEGIDRLLSPIEFAVALGHIARHRGFKSNSKGAKTSDLDAESSRMKKAVGETREKLARFGSPAKLLVEDEGFVLRQTKLKSGALETVRRFRNRDGDYSRSLLRDDLAAEVRALFRAQARLQSTFAKVELEAEFTQAAFFQRPLQDSERLVGPCPFEPAEKRSPKRGYSFELFRFLSRLNHLTLREGSEERTLTVEELRTAAADFGGVAKFTFSTLRKRLALPDIAIFVGIKADDEKKLDVVARSGEAATGTARLRRVVIDALGELAWGALISAPERLDKITEIITFRSDLDRIRAGLIEAGFDTPLIEAIVRAAADGKLDAFTGVGHISAKAARNIIPGLMRGMTYDKACAAAGYDHTASRERDAFDVGMHGKEALKKILQEERISRELVGSPSARKALIEAVKQVKAIIEKYGVPDRIHVELARDVGKSIEERRDIHFGIEKRSRQKDKLRELFGKEVGHLPQDGERGKEELLRFELWNEQMGRCLYTDEYINPKQLVASDNSVQVDHILPWSRFGDDSYLNKTLCTAKANQDKKGRTPYEWFRADKPEAEWDAFVARVESIQFMKGLKKRNYKLKNAEEAAEKFRSRNLNDTRWTCRLLAEALKQLYPKGEKDKDGKERRRVFTRPGALTNRLRRAWSLQRRKKSEKGERIADDRHHALDAIIVAATTESLLIRATREVQDIERKGLHYDLTKNITQPWPGFADEALDAVEKVFVARAERRRARGKAHDATIRHIAVRDDEAKVYERKKVGDIKLGDLIRVKDAERNAPLIENLRKWIEAGSPRDNPPLSPKGDPVSKVRLVTKNKVNITLDTGNPERLATVDRGEMARVDVFRKANRKGKYEYYLVPIYPHEIATMETPPMRAVQGGGDDDKWPEIDSTFEFLWSINQLSLLELTKPDGEVIRSYFRSLDRNTGALTVSGIANSTATRKGIGTRTLIDFKKLHVDRLGQIFEVERELRTWRGETWRGKDCI

SEQ ID NO: 196 - protein, 1087 aa, Phascolarctobacterium succinatutens
MLRMKYAIGLDIGIASVGYAVLALDHEENPWGIIRLGSRIFDVAENPKDGASLALPRREARSVRRRLRRHHHRLERIKNLLINTEFITKDELLHLYDGNLSDVYELRVKALDYSVTNAELTRILLHLAQRRGFKSNRKSDANDKEAGQLLEAVSANAKRMQENHYRTVGEMFYKDDLFSKYKRNKGGTYLTTVHRDMIAAEARTILEKQFALGNNICTQDFIDKYLSILLSQRQFDEGPGEPSPYAGNQIANMIGKCTFEPNEYRAAKASYSFERFNLLQKVNHLRLLLEGKSIALDNEQRKKIIALAHDKADLRYSHIRKALGLDEKVLFNTITYNDDVSVIEKKTKFNFLQAYHQIKKVLAEDMQKLTTEQLDNIGQILSTYKSDNKRTEELSALGLEKKIIDALLGINGLSKFAHLSLKALRKINPYLEEGKIYNEACTAAGYDFKAHANTQKTELLPAYKEEMDDITSPVARRAIAQSIKVINAIIREQKGSPLYINIELAREMAKGFDERTQIDKANKENQAKNERIMERIRTEFHKANPTGMDLIKLKLWEEQDGRSPYSQKAISINRLFEPGYVDIDHIVPYSISFDDSFKNKVLVFSDENRDKGNRLPIAYLQSKFGAKAAENFMIWVQSNIKDYKKRQKLLKREITEEDINKFKERNLQDTKTISRFLYNYINDYLLFAPSDTGKKKRVTAVNGTITAYLRKRWGINKIRANGDKHHAVDAVVIACTTDKMIKDLSSFSRYHELEYTHTDTESFLVNSLTGEILKRFPYPWEDFRPELMARLSDNPADALRKLNLIFYHGIDLSTIKPIFVSRMPRHKVTGAAHKATIKSARCLDNGIVICKTSLQNLKLDKEGEIANYYAPESDTILYNALKERLRSYDNKPAKAFAEPFYKPKADGTPGPLVKKVKVYEKSTLNVAVQQNTAVADNDSMVRVDVFHVKGNGYYLVPIYIADTLKKELPNKAIVAYKPYADWPVMDDSNFIFSLYPNDLIKFEHKNSVKFAKVNKESTLNDFYSTKSEIVYFKGCNINTGAITIINHENTYVVSSLGVKTLPSLEKYQADVLGNYTKVKKEVRKPFR

SEQ ID NO: 197 - protein, 1375 aa, Lactobacillus ruminis
MRKNQEPYNIGLDIGTSSIGWSIMNDNFDLMRVKGKKGIGVRLYNEGQSAAERRMHRTARRRYGRRKWRLRLLEDFFDEHMAEVDDTFFARLKDSNISPKDDKKYRKSLLFPKSKGVTYQDDGEFYKKYPTMYHLRYALMTEHRKFDLREIYLAFHHMVKYRGNFLYDTSVDSFEAKNLDIKGKFDEINDLLSSYTDFYVDNSNAALVESILLEKNTTRKDKSKKIAKLLHVEDKEKGKNKKAKDLATQISNAVLGLKCNFHLIFELQQKYSFDLCSEKTEENIAKLSEVLDENQKMLLMILKEVQDQVMLNAFVPSGMSLSEAMMQKYDDYGEQLKIYHELEHSVSDDSAAKLRGAYRDYNDNIIKRIDGDNKKDTFYKRVKNILTKISKEYVDQDVLESCGKLKKLIDENKLFIRQRTAANGVLPHQLHQIEMRKIIDNQKEYYPWLAEPNPNEKRRVYSKYKVEELIAFRIPYYVGPLVDPNNADKNKEARFSWMVRKKDGEITPWNFYDKVDWAESANNFIERMKSKDTYLLGEDVVPKESMLYQKYEVLNELNNLRINDSGLSDSFEDVKLKQAIYNDLFKKQKIVKITDLQNYLVQNHKYLVKPKISGLADENRFLSSLSTYSDLKTIFGDKVDDRTYFNDFEKMVEYSTVFEDGHDYNQKLDEYTWLTKEEKYKIGKKRYRGWGKLSKKLLTGLRDKNNHTIMDNLWETNRNFMQIQTADEFSKQIAEENERHLKGSVSDAINDMYTSPANKKAIRQVLRVVDDIQKAMGYAPSSISLEFAREDGPSVRTVSRANRMKSIYEKYASEVSEEVMKDLDGVIKDKKGLNDRLYLYFEQQGKDMYSGHPLDFDKVISGQEYDIDHILPQAVIKDDSLDNRVLTTKALNNDVKSKGVPCRMFNGMHSFWKNLYDKGFISRRKFNNLTTNPENIDKYKMKGFVNRQLVETRQIIKLVANVLNDKYQNDDVDIIEVRAELTHDVRKHFKFYKNRNVNDYHHAFDAYLTSFIGHYLFKKYPNLRPLFDYNDFMKVSDNVFKQLRGNNFLGEFLNKTGDIISTDGNFVLNKEEMINKLNKAYAFKKILVTKEVGQRTGAMFNETRYPAPNSRKAALKYRRMPKPDSLISVKDYKNTDIYGGYSGKNDAYMVIVDMGKQYMVVGVPVRYTEKLDKLRIKHSELYRDELRKVLSRDKTLLDSKGNVKRFDIVLDRVLYGQLIEDGNELFTLGSSKYKRNFRQLFLDKQCIEILDSSATPQPTDEELIWVYDQILDKVDKYFELYDINRQRETLRKGRAAFCSLPNISMKKDDVTKKKILNEILVALHANESESNCEKIGKKVFGRLQVPGGIKLSKEAKLIYQSPTGLFERVVYLKDL

SEQ ID NO: 198 - protein, 1391 aa, Prevotella oralis
MKKILGLDLGTTSIGWALVNEKENNEELSSIIRLGVRVNPLTVDEKSNFEKGKDITTNADRTKCRSARRNLQRFKLRREALADCLKRHGLMTDETPLCETNNSIIFKTYSNRAKAVCEKIALDDFVRVLFMINKKRGYKSSRKLNTDDEGTLVDGMDVAKLLYNEQITPGEYLLRLFKKGKKTRPDFYLSDLKAELERIWDFQRTFYPEILCNALKEDLKGKSRTQSSAIFYAKYKVSTAKIAGKDKRLQELTWRTDALRKQLTIDEVAYVICSINGEVNGSSQRLSMISDRSKLLYFNHQTIGQYLMQRLEENPNAGLKNIIFYRQDYEDEFNDIWNSQATYHKELTPELKKEVKDIIFYQRGLKSCKWLINYCELEHEEIEVKTPEGKLRKITIGSKTCPKSSPLFQEFKIWQVLNNLQVSPLNSRRKAKRKKDEEPSLFSDEDMNTACRYLNEEEKLTLFKELSIKKELKKKDALKLLFENYKELDLNYKVISGNVTMANLYRAFQDIISLTGNGEFDFQAMPAEEAEKTVEEIFGGLGYKTAFLHFDASLHDKEFERQPAYRLWHLLYSYAGDQSKTGIEALVKRIQELCGFEPEYARILANISFIPDYGNLSSKAMRKILPYMQDGYEYSEACSKAGYRHSASSLTKEEINKKNYKTHLDEIKRNSLRNPIVEKILNQMVNVVNSVIDTYSNIDEIRIEMARELKKSKPEREDMSFAISKATKETERIKGILEQEFKIQHVTRNDIIRYRLYEELKPNGYKTLYSNTYIPREDLFSKKFDIEHIIPKARLFDDSYSNKTLELRDINIEKGNQTAYDFVLSKYGEEGLYKYEQRVEEFKKNNEQAGTKCRKLLMREADIPSDFLNRDLNDSQYIAKKAHELLREIVPTVTATTGSITNRLREDWKLVNVMKELNWEKYDKLGLTEEYKDKDGNTVRHIKDWTKRNDHRHHAMDALTIAFTKPSFIQYLNNLNARSNRGGSIYGIEQKELERENNKLVFIPPIDPKIFRKQAKEHLSNILISIKAKNKVVTKNVNKTKSKSGTNRKVQLTPRGQLHLETVYGKIRTYKTEEIKVGTKLTEELIAKVADKKIREALMQRLSEYGGNIKKAFQNISKHPIWLNGSHTKHVPEKVKIVFFEDVFTIRKAITPDIKIDKVIDSKIRRILQERLNEFGGEASKAFSNLDENPIWFNRDKGIAIKSVKIRGIAKGTAIRVKKDIHGKTIIGNNGYPVANDYVNTGNNHHVAIFRDKDGNLQEHIVSFYEATARAIQNLPIVDRNYNSEKDWKFLFSMKQNEYFVFPNPNTGFNPSEISLKDEKNYALISPNLFRVQKLSHYYYVFRHHLETNVDTNLQLKDITWKRITAVNNLTGAVKVRIDHLGRIVDVGEYK

SEQ ID NO: 199 - protein, 1167 aa, Streptococcus sanguinis
MLFGLKTKFKDCFELEEEPDLNFSKENYDDNLEKLLGELGEDFSDVFDKLKILRDTILLSGMLTYTGATHARFSATMVERYEEHRKDLQRFKSFIKQNLSEQDYLDIFGRKTQNGFDVDKETKGYVGYITNKMVLTNPQKQKTIQQNFYDYISGKITGIEGSEYFLNKISDRTFLRKLRTSDNGAIPNQIHAYELEKIIERQGKDYPFLLENKDKLLSILTFKIPYYVGPLAKGNNSRFAWIKRANSSDILDDNDEDTRNGKIRPWNYHKLINMDETRDAFITNLIGNDTILLNEKVLPKRSLIYEEVMLQNELTRVKYKDKYGKAHFFDSEHRQNIINGLFKINSKRVNAERLIKYLSDNHKDLNAIEIVSGVEKGKSFNSTLKTYNDFKTIFSEEFLDSEIYQKELEEIIKVITVFDDKKSIKNYLTKYFGHLEFLDEEKINQLSKLRYTGWGRYSAKLLLDIRDEDTGFNLLQFLRNDEENRNLTNLISDNTLSFDPKIKAIQSKSTVEDDVFDEIKKLAGSPAIKRGILNSIKIVDELVQIIGYPPQNIVIEMARENMTTEEGQKKTKTRKSKLESALKNIENSVLENGKVLHSDEQLQSEKLYLYYLQNGKDIYSLDETGSPAPIYLDQLDQYEVDHIIPYSFLPIDSIDNKVLTHRKNNQRKLDNIPDKETVAHMKPFWEALYNAKLISQTKYQRLTTSERTPDGVLTESMKAGFIERQLVETRQIIKHVARILDNRFSDTKIITLKSQLVTNFRNTFHIAKIRELNDYHHAHDAYLAVVVGQTLLKAYPKLAPELIYGHHVHFNRHEENKATLRKHLYSNIMRFFNNPDSKVSKDIWDCNRDLPIIKHVIYNSQINFVKRTMIKKGAFYNQNPVGKFNKQLAANNRYPLKTKALCLDTSIYGGYGPMNSTLSIIIIAERFNEKKGKIETVKEFHDIFIIDYEKFNNNPFQFLNDTSENGFLKKNNINRVLGFYRIPKYSLMQKIDGTRMLFESKLNLHKATQFKLTKTQNELFFHMKRLLTNSNLMDLKSESAIKESQNFILKHKEEFDNISNQLSAFSQKMLGNTTSLKNLIKGYNERKIKEIDIREETIKYFYDNFIKMFSFVKSGAPKDINDFFDNKYTVARMRPKPDKRLLNATLIHQSITGLYETRIDLSKLGED

SEQ ID NO: 200 - protein, 1334 aa, Staphylococcus pseudintermedius
MGRKPYILSLDIGTGSVGYACMDKGFNVLKYHDKDALGVYLFDGALTAQERRQFRTSRRRKNRRIKRLGLLQELLAPLVQNPNFYQFQRQFAWKNDNMDFKNKSLSEVLSFLGYESKKYPTIYHLQEALLLKDEKFDPELIYMALYHLVKYRGHFLFDHLKIENLTNNDNMHDFVELIETYENLNNIKLNLDYEKTKVIYEILKDNEMTKNDRAKRVKNMEKKLEQFSIMLLGLKFNEGKLFNHADNAEELKGANQSHTFADNYEENLTPFLTVEQSEFIERANKIYLSLTLQDILKGKKSMAMSKVAAYDKFRNELKQVKDIVYKADSTRTQFKKIFVSSKKSLKQYDATPNDQTFSSLCLFDQYLIRPKKQYSLLIKELKKIIPQDSELYFEAENDTLLKVLNTTDNASIPMQINLYEAETILRNQQKYHAEITDEMIEKVLSLIQFRIPYYVGPLVNDHTASKFGWMERKSNESIKPWNFDEVVDRSKSATQFIRRMTNKCSYLINEDVLPKNSLLYQEMEVLNELNATQIRLQTDPKNRKYRMMPQIKLFAVEHIFKKYKTVSHSKFLEIMLNSNHRENFMNHGEKLSIFGTQDDKKFASKLSSYQDMTKIFGDIEGKRAQIEEIIQWITIFEDKKILVQKLKECYPELTSKQINQLKKLNYSGWGRLSEKLLTHAYQGHSIIELLRHSDENFMEILTNDVYGFQNFIKEENQVQSNKIQHQDIANLTTSPALKKGIWSTIKLVRELTSIFGEPEKIIMEFATEDQQKGKKQKSRKQLWDDNIKKNKLKSVDEYKYIIDVANKLNNEQLQQEKLWLYLSQNGKCMYSGQSIDLDALLSPNATKHYEVDHIFPRSFIKDDSIDNKVLVIKKMNQTKGDQVPLQFIQQPYERIAYWKSLNKAGLISDSKLHKLMKPEFTAMDKEGFIQRQLVETRQISVHVRDFLKEEYPNTKVIPMKAKMVSEFRKKFDIPKIRQMNDAHHAIDAYLNGVVYHGAQLAYPNVDLFDFNFKWEKVREKWKALGEFNTKQKSRELFFFKKLEKMEVSQGERLISKIKLDMNHFKINYSRKLANIPQQFYNQTAVSPKTAELKYESNKSNEVVYKGLTPYQTYVVAIKSVNKKGKEKMEYQMIDHYVFDFYKFQNGNEKELALYLAQRENKDEVLDAQIVYSLNKGDLLYINNHPCYFVSRKEVINAKQFELTVEQQLSLYNVMNNKETNVEKLLIEYDFIAEKVINEYHHYLNSKLKEKRVRTFFSESNQTHEDFIKALDELFKVVTASATRSDKIGSRKNSMTHRAFLGKGKDVKIAYTSISGLKTTKPKSLFKLAESRNEL

SEQ ID NO: 201 - protein, 1156 aa, Ruminococcus albus
MGNYYLGLDVGIGSIGWAVINIEKKRIEDFNVRIFKSGEIQEKNRNSRASQQCRRSRGLRRLYRRKSHRKLRLKNYLSIIGLTTSEKIDYYYETADNNVIQLRNKGLSEKLTPEEIAACLIHICNNRGYKDFYEVNVEDIEDPDERNEYKEEHDSIVLISNLMNEGGYCTPAEMICNCREFDEPNSVYRKFHNSAASKNHYLITRHMLVKEVDLILENQSKYYGILDDKTIAKIKDIIFAQRDFEIGPGKNERFRRFTGYLDSIGKCQFFKDQERGSRFTVIADIYAFVNVLSQYTYTNNRGESVFDTSFANDLINSALKNGSMDKRELKAIAKSYHIDISDKNSDTSLTKCFKYIKVVKPLFEKYGYDWDKLIENYTDTDNNVLNRIGIVLSQAQTPKRRREKLKALNIGLDDGLINELTKLKLSGTANVSYKYMQGSIEAFCEGDLYGKYQAKFNKEIPDIDENAKPQKLPPFKNEDDCEFFKNPVVFRSINETRKLINAIIDKYGYPAAVNIETADELNKTFEDRAIDTKRNNDNQKENDRIVKEIIECIKCDEVHARHLIEKYKLWEAQEGKCLYSGETITKEDMLRDKDKLFEVDHIVPYSLILDNTINNKALVYAEENQKKGQRTPLMYMNEAQAADYRVRVNTMFKSKKCSKKKYQYLMLPDLNDQELLGGWRSRNLNDTRYICKYLVNYLRKNLRFDRSYESSDEDDLKIRDHYRVFPVKSRFTSMFRRWWLNEKTWGRYDKAELKKLTYLDHAADAIIIANCRPEYVVLAGEKLKLNKMYHQAGKRITPEYEQSKKACIDNLYKLFRMDRRTAEKLLSGHGRLTPIIPNLSEEVDKRLWDKNIYEQFWKDDKDKKSCEELYRENVASLYKGDPKFASSLSMPVISLKPDHKYRGTITGEEAIRVKEIDGKLIKLKRKSISEITAESINSIYTDDKILIDSLKTIFEQADYKDVGDYLKKTNQHFFTTSSGKRVNKVTVIEKVPSRWLRKEIDDNNFSLLNDSSYYCIELYKDSKGDNNLQGIAMSDIVHDRKTKKLYLKPDFNYPDDYYTHVMYIFPGDYLRIKSTSKKSGEQLKFEGYFISVKNVNENSFRFISDNKPCAKDKRVSITKKDIVIKLAVDLMGKVQGENNGKGISCGEPLSLLKEKN

SEQ ID NO: 202 - protein, 1440 aa, Weeksella virosa
MKTILGLDLGTNSIGWALVEQDFENKQGLILGMGSRIIPMDAGIIGKFAEGSSISQTAERTGYRSIRRLRERHLLRRERLHRVLNILKFLPEHYAAEIDFEKRFGQFLAETEPKLAWKKNAEGKFEFLFQRSFDEMVADFKANGQDIKIPYDWTIYYLRKKALTQKISPQELAWIILNFNQKRGYYQLRGEEEEENPNKKVEFYSLKIVDVVADEQPNKKGDTWYSLHLENGWVYRRSSKIPLYDWKDKVRDFIVTTDINEDGSEKLDKDGEVKRSFRAPKEDDWTLIKKKTEQEIEQFNQTVGSYIYEALLDNPTQKIRGKLVRTIERKFYKSELKKILEKQIELQPELFTEDLYNACARELYRRNVAHQQQLSSRDFVYLFLNDIIFYQRPLRSQKSLISNCSLEFRTIKDKDGNGQIIYLKAIPKSNPYYQEFRVWQWLYNLKIFTKEDDKDVTNQFINKVEDLEALFEFLMNQKEVNHTDILTYLIEPIVKSKYPNAKGKAFKDELKKELKKYRWNYVYDADKDESKSYPMNETRYELRKRLDKVENVPADFMTRKIEQHLWHIIYSVTDKIEFEKALKSFANKYDLHQESFVENFKRFKPFDSDYGTYSEKAIKKLLPLMRVGKYWSWDIIDDKTKTRIGKIITGEYDETIKNRVREKAIDLTEENHFQGLQLWLAQYIVYDRHSEADIAGKWNSVADLEQYLSEFKQHSLRNPIVEQVITETLRVVRDIWKQYGKGAKDYFDEIHIELGREMKNTAEERKRLSSIISENETTNLRIRAILEELMYDENMENVRPYSPMQQEALKIYEDGVLSSSVEIPEDIEKISKKSEPTKSEIQRYKLWLEQKYRSPYTGRPIPLSKLFTPAYQIEHIIPQARFFDDGFSNKVICESEVNALKDKMLGLEFIQNYYGQKVTTSFGEVTILTEDAYKAFVKEHYDKNRSKRNKLLLEEIPEKMIDRQMNDTRYISKYISKVLSNLVRGEKDDEGVNSKNIIPGNGKITGILKQDWGLNDVWNDLILPRFERMNQLTNSTDFTAWNEKHQKFLPSVPLELSKGFQKKRIDHRHHALDALIIACATRDHVNLLNNKHAKSRNERYDLQHKLRHTTPWQDKEGKVRTKFTEFKKPWETFTQDTKKELEKIVVNFKQNLRVINKATNYYEKIVDGKKVMFKQEGVNWAIRKPMHKETVSGKIDLPRVKVSKGKILTATRKSLDTSFNAKTILSITDTGIQKILLNYLKAKGNPELAFSPEGIEEMNQNISLYNDGKPHQPILKVRVFEQGSKFPLGETGNKTTKYVEAAKGTNLFFGVYEDNQGKRSYDTIPLNIVIERQKQGLNSVPETNEKGHRLLFSLSPNDLVYVPIEGEVFDETNPDVNRIYKVVSFSGSQMFCVRQDVATSIVYKLEFSSLNKMERTIDGIMIKEICIKLKVDRLGNISKA

SEQ ID NO: 203 - protein, 1179 aa, Sphaerochaeta globus
MSKKVSRRYEEQAQEICQRLGSRPYSIGLDLGVGSIGVAVAAYDPIKKQPSDLVFVSSRIFIPSTGAAERRQKRGQRNSLRHRANRLKFLWKLLAERNLMLSYSEQDVPDPARLRFEDAVVRANPYELRLKGLNEQLTLSELGYALYHIANHRGSSSVRTFLDEEKSSDDKKLEEQQAMTEQLAKEKGISTFIEVLTAFNTNGLIGYRNSESVKSKGVPVPTRDIISNEIDVLLQTQKQFYQEILSDEYCDRIVSAILFENEKIVPEAGCCPYFPDEKKLPRCHFLNEERRLWEAINNARIKMPMQEGAAKRYQSASFSDEQRHILFHIARSGTDITPKLVQKEFPALKTSIIVLQGKEKAIQKIAGFRFRRLEEKSFWKRLSEEQKDDFFSAWTNTPDDKRLSKYLMKHLLLTENEVVDALKTVSLIGDYGPIGKTATQLLMKHLEDGLTYTEALERGMETGEFQELSVWEQQSLLPYYGQILTGSTQALMGKYWHSAFKEKRDSEGFFKPNTNSDEEKYGRIANPVVHQTLNELRKLMNELITILGAKPQEITVELARELKVGAEKREDIIKQQTKQEKEAVLAYSKYCEPNNLDKRYIERFRLLEDQAFVCPYCLEHISVADIAAGRADVDHIFPRDDTADNSYGNKVVAHRQCNDIKGKRTPYAAFSNTSAWGPIMHYLDETPGMWRKRRKFETNEEEYAKYLQSKGFVSRFESDNSYIAKAAKEYLRCLFNPNNVTAVGSLKGMETSILRKAWNLQGIDDLLGSRHWSKDADTSPTMRKNRDDNRHHGLDAIVALYCSRSLVQMINTMSEQGKRAVEIEAMIPIPGYASEPNLSFEAQRELFRKKILEFMDLHAFVSMKTDNDANGALLKDTVYSILGADTQGEDLVFVVKKKIKDIGVKIGDYEEVASAIRGRITDKQPKWYPMEMKDKIEQLQSKNEAALQKYKESLVQAAAVLEESNRKLIESGKKPIQLSEKTISKKALELVGGYYYLISNNKRTKTFVVKEPSNEVKGFAFDTGSNLCLDFYHDAQGKLCGEIIRKIQAMNPSYKPAYMKQGYSLYVRLYQGDVCELRASDLTEAESNLAKTTHVRLPNAKPGRTFVIIITFTEMGSGYQIYFSNLAKSKKGQDTSFTLTTIKNYDVRKVQLSSAGLVRYVSPLLVDKIEKDEVALCGE

SEQ ID NO: 204 - protein, 1370 aa, Streptococcus gallolyticus
MTKKNYSIGLDIGTNSVGWAVITDDYKVPAKKMKVLGNTDKKYIKKNLLGALLFDSGETAEATRLKRTARRRYTRRKNRLRYLQEIFAEEMTKVDESFFYRLDESFLTTDEKDFERHPIFGNKAEEDAYHQKFPTIYHLRNYLADSSEKADLRLVYLALAHMIKYRGHFLIEGKLNAENTDVQKLFTDFVGVYDRTFDDSHLSEITVDVASTLTEKISKSRRLENLIKYYPTEKKNTLFGNLIALALGLQPNFKMNFKLSEDAKLQFSKDTYEEDLEELLGKIGDDYADLFTSAKNLYDAILLSGILTVDDNSTKAPLSASMIKRYVEHHEDLEKLKEFIKANKSELYHDIFKDKNKNGYAGYIENGVKQDEFYKYLKNTLSKIDGSDYFLDKIEREDFLRKQRTFDNGSIPHQIHLQEMHAILRRQGDYYPFLKEKQDRIEKILTFRIPYYVGPLVRKDSRFAWAEYRSDEKITPWNFDKVIDKEKSAEKFITRMTLNDLYLPEEKVLPKHSHVYETYAVYNELTKIKYVNEQGKESFFDSNMKQEIFDHVFKENRKVTKEKLLNYLNKEFPEYRIKDLIGLDKENKSFNASLGTYHDLKKILDKAFLDDKVNEEVIEDIIKTLTLFEDKDMIHERLQKYSDIFTANQLKKLERRHYTGWGRLSYKLINGIRNKENNKTILDYLIDDGSANRNFMQLINDDTLPFKQIIQKSQVVGDVDDIEAVVHDLPGSPAIKKGILQSVKIVDELVKVMGDNPDNIVIEMARENQTTNRGRSQSQQRLKKLQSSLKELGSNILNEEKPSYIEDKVENSHLQNDQLFLYYIQNGKDMYTGDELDIDHLSDYDIDHIIPQAFIKDDSIDNRVLTSSAKNRGKSDDVPSLDIVRARKAEWVRLYKSGLISKRKFDNLTKAERGGLTEADKAGFIKRQLVETRQITKHVAQILDARFNTEHDENDKVIRDVKVITLKSNLVSQFRKDFEFYKVREINDYHHAHDAYLNAVVGTALLKKYPKLASEFVYGEYKKYDIRKFITNSSDKATAKYFFYSNLMNFFKTKVKYADGTVFERPIIETNADGEIAWNKQIDFEKVRKVLSYPQVNIVKKVETQTGGFSKESILPKGDSDKLIPRKTKKVYWDTKKYGGFDSPTVAYSVFVVADVEKGKAKKLKTVKELVGISIMERSFFEENPVEFLENKGYHNIREDKLIKLPKYSLFEFEGGRRRLLASASELQKGNEMVLPGYLVELLYHAHRADNFNSTEYLNYVSEHKKEFEKVLSCVEDFANLYVDVEKNLSKIRAVADSMDNFSIEEISNSFINLLTLTALGAPADFNFLGEKIPRKRYTSTKECLTATLIHQSITGLYETRIDLSKLGEE

SEQ ID NO: 205 - protein, 1044 aa, Nitrosomonas sp.
MLHKMRYRLALDLGSTSLGWAMVRLNANQQPCAVIKAGVRIFSNGRNPKDGSSLAVTRREARSMRRRRDRLLKRKARMMRTLIEYGFFPANETQRKALENLNPYALRAKGLDEALTPSEFARALFHINQRRGFKSNRKTDKKDSDSGALKTAIKQLHSVLDPQGNDGKPRTVGELLYKRFTDLSKLPKDRTVRARYRQDKIVKDDGKTKIDKYYDLYIDRAMIEQEFDALWKKQSELNPILFTENARADLKDVLLYQRSLKPVKPGRCTFMSEEERAPLALPSTQRFRMYQEVNNLRILREGLKEESLTLQQRDDLINALEKNNRRTFTQIKKLLGVGGSVQFNFEDPKREELKGNTTSAILGKSEHFGEAWFAFNEAKQDAIVLQLIKEENEAKLVRWLQDETGIDEKRAEVIANAGLPEGYGSLCIEALARILPELRRDVVTYDKAVQAAGFEHHSKLNRNEEIPDITFKIESIDRNSGEIKQFHLHKELPYYGEYLQRHVGFGSGKPEDSIEKRYGKIANPTVHIGLNQVRVVVNALIKRYGHPSEIIVEVARDLKQSKDRRDEENKRQAENQKRNERLRKDIADILGISEERVRRDDIEKMILWEELSFDPADRRCPYSGVQVSTVMLLSDEVEVEHILPFSQTLDDSLNNKTVALRQANRIKGNRTPWEAFGTSNISGFDYSGILTRAELMPKAKRYRFAEDGYQRWLKDDAGFLARALNDTRHLSKIAREYMSLICPNTRVIPGQMTAMLRRNFGLNDVLGLNGEKNRNDHRHHAVDACVIAVTDQGLLQRFAAASASARERQLNRLVENMPLPWESYREHVRRAIDGIWVSHRPDHSHEGAMHNDTAYGLRGNGRVSFHKMVEGKREYIEDNLKVIEITDTKAIDRHGLLPTGKPRPYKGYKGDSNYCIEIVRNEKGRWEGEIISTFDAYQLVRKYGIVQLRYPVLSVSGKPLVMRLIRNDFVRLEHEGITRTLRVCKMREDGQVALADVTEANVDARTRTKEICYVFKTGGSLQKAKARRITISPIGELRDPGFKE

SEQ ID NO: 206 - protein, 1045 aa, Acidovorax avenae
MQKEKPLAYRLALDLGSTSLGWAVLRLSAPGEPSAVIRAGSRIFSDGRNPKDGSSLAVTRRAARAMRRRRDRLLKRKARMLAALERHGFFPQDEAARKALEKLNPYGLRARGLESALKPEEFGRALFHLNQRRGFQSNRKTDRKDSDSGALKQAIGTLRAQMHESGCRTVGEWFWKVRMERKPEGVKGQGVRARYRETPFTTDEGKKRIDKRYDLYVDRAMVAQEFDALWAAQATFAPALFNEAARAELRDILLHQRKLRPVQPGRCTLVPEEPRALLALPSTQRFRIYQEVNHLRVLHDELREEALTLAQRDQIVALLERQAKVTFTAMRKALGFSALFNLEDAKRDGLKGNATTAALGKKDLFGPLWAGFDTALQDEIVTQLMTEESEPRLIAWLQEHTGVDEARAQAIANAGLPEGYGSLGRTALARIVPELQRDVITYDKAVQAAGFAHHSDLGFSFEHDADEVERIGERTIASTGEIKPVFAFKQLPYYGRALQRHVAFAKENPRNDEERYGKIANPTVHIGLNQVRVVVNALMCRYGRPTEVVIELARDLKQSREQKLEAQQRQADNQKRNARIRRSIAEVLGISEERVRTLDIQKWILWEELSHDAADRRCPYSGVQISASMLLGERVEIEHILPFSMTLDDSLNNRTVALREANRIKRNRTPWDARTDFEAHGWSYDGILQRAERMPQRKRHRFAPDGYERWLGEDKDFLARALNDTRYLSRVAAEYLRLVCPGSATRVIPGQMTALLRGKFGLNDVLGLDGEKNRNDHRHHAVDACVIGVTDQRMMQRFAQANAQAREDGLTRLVEDMPLPWPTYRAHVERAVRHIWVSHKPDHGFEGAMMEETSYGILRDGTIKQRRKADGSAGREISRLIRITEPSQPQRHGVDAEGRPLPYKGYVGGSNYCLEITVNDKGKWEGQVISTFDAYRIVREGGLRQLRHSTQGQNGQALAMRLVIGDSVRLEVDEQERVMRIVKINGNNGQVFMAPVHEANVDARNSDKNEAFAYTSKIAGSFQKTKARQVTISPIGELRDPGFKG

SEQ ID NO: 207 - protein, 1218 aa, Prevotella denticola
MKASEEKLSKGLSTYMKENNLLTVGAAFAQLEDEGVRIRNNNNYRAIRSQFQHEIETIFMFQQGLSENELYERLVSEKKNIGTIFYKRPLRSQRGNVGKCTLERTKPRCAIGHPLFEKFRAWTLINNIKIRMSEEEQAEQLPMKLRFELYNDCFLAFVRAEFKFEDIRKYLEKRLGVHFSYNDKTINYKDSTSVAGCPITARFRKLLGEDWESFHVDGQKQRQAHGKNNASFHTVSYSTNDIWHFCYDAEEPEAVLSFAQDNLKWEKKKAEELVRIWSAIPQGYAMLSQKAIRNINKMLILGLKYSDAVLLAKVPEIVEITDGEILSVTEDYHRVEAQVGYEKQINNIVNALIAKYKSASEEYRFADHNYEYQLDKSDEKDIIKQIESNIGTRKWSLLDADEQTDILQKVRDKYQNFFRSHERKFVESPKLGECFEEYLMKKFPMVEGEQWKKLYHPSQIAIYRPVSAGKDRSALRLGNPDIGAIKNPTVLRVLNTLRKRVNQLLDDGLISPDETRVVVETARELNDANRKWALDNYNRIRHDENEKIKKILEEFYPKRDGISTDDIDKARYVIDQREMDYFTEEKPYNKDIKKYKLWLEQGGQCMYTGRTINLSNLFDPNSFDVEHTIPESISFDSSDMNLTLCDAHYNRFIKKNHIPADLPNYDKSVVIDGKEYSPIKPRLQRWADRVERLNRNVEYWRGQARRAQNKDRKDQCMREMHLWKMELEYWTKKLERFTITEVTDEFKNSQLVDTRVITRHAVLYLKSIFPHVDVQRGDVTAKFRKILGIQSVDEKKDRSLHSHHAIDATTLTIIPGAAKRERMLELFAKIEEVNKMLSFSGNEDRTGLKQELDGLKNQLNKEVKACRIGHNVSEIGTFINDNIIINHHVKNQALTPVRRRLRKRGHIVGGMDNPRWQTGDALRGEIHKASYYGAITQFAKDKDGKVLLKEGHPLVDPTIKFVIRRELKYKKSTADSGFASWDDLEKAIVDKELFALMKGQFPEETSFKDACEQGIYMIKKGKNGEVDTKLYRIRHIRCKTKQKNALKIKEQAYKSEKEYKRYFYAAVGDLYAMCCYTNGKTREFKIYSLYDISCHRKVGVEDIPEFITDKKGNRLMLDYKLHTGDMILLYKENPEELYDLDNVSLSKLLYKINGFENDGLRIRMVNHLVAKEAMGESVKDYAKLPDIIRCGVKTIKFLVMGENRDFVIKNGKISFNHR

SEQ ID NO: 208 - protein, 1458 aa, Fluviicola taffensis
MTKTILGLDLGTNSIGWALINQDFDNKKGEILGMGSRIIPMTQDIKDEFGKGNSISQTAERTRLRGVRRLIHRTLLRRERLHRVLNIIGFLPEHYANQIDFEKRFGKFKPESEPKISFDGNDVFLFEKSYQEMLVDFKIHQPQLVSNGKKIPHDWTIYYLRKKALSKKIEKEELAWILLNFNQKRGYYQLRGEEEEETPNKLVEFHSLKIVEVNADEPQKGKPEIWYSLVLENGWVYRRASKTPLFDWKDKIREFIVTTEINNDGTVKTDKEGTEKRSFRAPKPEDWTLQKKKTEFELSKSGNEVGAFIYESILQKPNQKIRGKLISTIERKFYKEELKTILKTQLFFHKELKDEKLYNACIEELYKNNEAHRSLLSNKGFEHLFINDILFYQRPLRSKKSQISNCPLEKRTYKKEGIEITEGIKVISKSNPIYQEFRLWQWISNLSLYCIEPTETNVTSTFLNSIEDYENLFEFLNNRKEIEQKHLLKYLLENQGFKGKLLTNELEKFRWNFVADKKYPCNETGSLLHTRLSKVKNISPDFLTKEIEHQLWHIIYSVTDKIEYEQALKTFARKNNLDVDSFFEHFKKIPPFESTYGAYSEKAIKKLLPLIRLGKYWNWEAIDSISKDRISKILSGEYDENIKNRVREKAVHLTSENNFQGLQEWLAKYIVYDRHSEGNDLGKWTSVSDLETYLKEFKQHSLRNPIVEQVITETLRVVKDIWIKHGKGTENFFDEIHVELGREMKNNSEDRKRLTNTITENENTNLRIKALLMEMMNDNDVENVRPYSPSQQEILKIYEDGALNSNIELDDEIVKISKKAEPTKSELQRYKLWLEQKYRSPYTGQVIPLNKLFTSEYEIEHVVPQSRFFDDSFSNKVICESAVNKRKDNQLGLQFIKNHSGEKVELGFGKVVQVFTEEQYLDFVKEHYSKNRSKHNKLLLEEIPEKMIERQLNDTRYISKFVSSILSNIVRSEKDDDGLNSKNILPGNGKITTELKRDWGLNDVWNDLILPRFERMNTITNSDLFTTYNDKYQKHLPTVPFEYSKGFQKKRIDHRHHAMDALVIACATRDHLNLMNNQSAKSELKRYDLQNKLRKKEPYFNQKENKQKEAFKDFIKPWGTFTEDSKNALEKIIISFKQNLRVINKATNSYESYKDEDGNLRIGKDGKPEKGLIKQKGLNWAIRKPLHKDTVSGQINLSRIKLPNGKILTATRKNLDTSFDLKTIENSITDTGIQKILKNYLLSKESPELAFSPEGLEEMNNEIEKYNNGKFHHPINKARIYELGSKFNVGQTGNRRDKFVEAAKGTNLFFAIYQDENKNRSYETIPLNEVIEHQKWRASLPKEEQEKIPLVPVNKLKGTFIFSLSPNDLVYVPSNDELERSASIDFSKLKKEQINRLYKMVSSSGSQCFFVKSEVATSVVNKMEYSSLNKMEKSIDNLMVKEICIKLKIDRLGNISKA

SEQ ID NO: 209 - protein, 1384 aa, Coriobacterium glomerans
MKLRGIEDDYSIGLDMGTSSVGWAVTDERGTLAHFKRKPTWGSRLFREAQTAAVARMPRGQRRRYVRRRWRLDLLQKLFEQQMEQADPDFFIRLRQSRLLRDDRAEEHADYRWPLFNDCKFTERDYYQRFPTIYHVRSWLMETDEQADIRLIYLALHNIVKHRGNFLREGQSLSAKSARPDEALNHLRETLRVWSSERGFECSIADNGSILAMLTHPDLSPSDRRKKIAPLFDVKSDDAAADKKLGIALAGAVIGLKTEFKNIFGDFPCEDSSIYLSNDEAVDAVRSACPDDCAELFDRLCEVYSAYVLQGLLSYAPGQTISANMVEKYRRYGEDLALLKKLVKIYAPDQYRMFFSGATYPGTGIYDAAQARGYTKYNLGPKKSEYKPSESMQYDDFRKAVEKLFAKTDARADERYRMMMDRFDKQQFLRRLKTSDNGSIYHQLHLEELKAIVENQGRFYPFLKRDADKLVSLVSFRIPYYVGPLSTRNARTDQHGENRFAWSERKPGMQDEPIFPWNWESIIDRSKSAEKFILRMTGMCTYLQQEPVLPKSSLLYEEFCVLNELNGAHWSIDGDDEHRFDAADREGIIEELFRRKRTVSYGDVAGWMERERNQIGAHVCGGQGEKGFESKLGSYIFFCKDVFKVERLEQSDYPMIERIILWNTLFEDRKILSQRLKEEYGSRLSAEQIKTICKKRFTGWGRLSEKFLTGITVQVDEDSVSIMDVLREGCPVSGKRGRAMVMMEILRDEELGFQKKVDDFNRAFFAENAQALGVNELPGSPAVRRSLNQSIRIVDEIASIAGKAPANIFIEVTRDEDPKKKGRRTKRRYNDLKDALEAFKKEDPELWRELCETAPNDMDERLSLYFMQRGKCLYSGRAIDIHQLSNAGIYEVDHIIPRTYVKDDSLENKALVYREENQRKTDMLLIDPEIRRRMSGYWRMLHEAKLIGDKKFRNLLRSRIDDKALKGFIARQLVETGQMVKLVRSLLEARYPETNIISVKASISHDLRTAAELVKCREANDFHHAHDAFLACRVGLFIQKRHPCVYENPIGLSQVVRNYVRQQADIFKRCRTIPGSSGFIVNSFMTSGFDKETGEIFKDDWDAEAEVEGIRRSLNFRQCFISRMPFEDHGVFWDATIYSPRAKKTAALPLKQGLNPSRYGSFSREQFAYFFIYKARNPRKEQTLFEFAQVPVRLSAQIRQDENALERYARELAKDQGLEFIRIERSKILKNQLIEIDGDRLCITGKEEVRNACELAFAQDEMRVIRMLVSEKPVSRECVISLFNRILLHGDQASRRLSKQLKLALLSEAFSEASDNVQRNVVLGLIAIFNGSTNMVNLSDIGGSKFAGNVRIKYKKELASPKVNVHLIDQSVTGMFERRTKIGL

SEQ ID NO: 210 - protein, 1077 aa, Neisseria bacilliformis
MQQKPQRYILGLDLGIASVGWACVWADENEHPTGLLDCGVRTFERAEVPKTGDSLALARRQARSVRRLIRRRAHRLLRLRRLLKREGVLLSADFNENGLVRGLPIDAWALRVAGLDRKLSNKEWAAVLLHLVKHRGYLSQRKNETQSKDKELGRLLAGVNGNREALQNRSDEYRTAAELAVKKFAAENNGSLRNKGGDYSHTFDRKDLQRELHLLFERQRALDNPFTSSEMEAAVDELLMKQRSALQGEAVLKMLGRCTFEPSEYKAAKNTYSAERFVWLTKLNNLRIQYNGEERALSEAERRLLLDEPYQKAKLTYKQVRTILELPESAVFKGLRYGHGEDGLKAESGTLMEMKAYHAVRKALKDAGLEGEWENRIRNPELLDAIGTAFSLYKTDEDIRANLAAFRLSENVLEALLAGLNFDKFVHLSLKALAKILPLMEQGMRYDEACKEAYGDHYGAKEQEDHRLLPPFVADDIRNPVVFRTLTQARKIVNEIVRRYGSPLRVHIETGREVGKSFSDRKEIEKRQEENRKERERAAAHFKELFPNFAGEPKAQDILKLRLYEQQHGKCLYSGKEIDLRRLPEKGYVEIDHALPFSRTWDDSFNNKVLVLGKENQDKRNRTPYEYLDGKGNSGAWRAFAERVSGCRFPYAKKQRLLTQKLDEKTEQGFLERNLNDTRYVARFLCQFIEEKMHLEGAGKKRVFASNGQITALLRGFWGLKKVREENDRHHALDAVVVACSSVSMQQKITRHFRYREELEHIDRETGEVIHGFPQPWEFFRQEVMTRVFSDDPVSELAEKLDSRPEAVHEFVTPLFVSRAPHRKVTGQGHLETIRSAKRLDEKISVVKLPLTQLKTKDIERIVGYPNREPALYDALAARLAAFKDDPAKAFSEPFYKTGKDGKCGVLVKAVRVENVQKSGLLVRKDESGKMQGVADNATMVRVDVFGKNGKNYLVPVYAWQVEKGELPNRAVVAYADEEDWDEMDDSFEFKFSLYPNDLVEVVTKKDKFFGYYSGFNRATGAINIKEHDLSKSKVKNGVYEGIGVKTAQSFQKYQVDTLGKTIRLCKPEKRMGFKKK

SEQ ID NO: 211 - protein, 1029 aa, Alicycliphilus denitrificans; identical to SEQ ID NO: 188

SEQ ID NO: 212 - protein, 1122 aa, Streptococcus suis; identical to SEQ ID NO: 82

SEQ ID NO: 213 - protein, 1428 aa, Parasutterella excrementihominis
MGKTHIIGVGLDLGGTYTGTFITSHPSDEAEHRDHSSAFTVVNSEKLSFSSKSRTAVRHRVRSYKGFDLRRRLLLLVAEYQLLQKKQTLAPEERENLRIALSGYLKRRGYARTEAETDTSVLESLDPSVFSSAPSFTNFFNDSEPLNIQWEAIANSPETTKALNKELSGQKEADFKKYIKTSFPEYSAKEILANYVEGRRAILDASKYIANLQSLGHKHRSKYLSDILQDMKRDSRITRLSEAFGSTDNLWRIIGNISNLQERAVRWYFNDAKFEQGQEQLDAVKLKNVLVRALKYLRSDDKEWSASQKQIIQSLEQSGDVLDVLAGLDPDRTIPPYEDQNNRRPPEDQTLYLNPKALSSEYGEKWKSWANKFAGAYPLLTEDLTEILKNTDRKSRIKIRSDVLPDSDYRLAYILQRAFDRSIALDECSIRRTAEDFENGVVIKNEKLEDVLSGHQLEEFLEFANRYYQETAKAKNGLWFPENALLERADLHPPMKNKILNVIVGQALGVSPAEGTDFIEEIWNSKVKGRSTVRSICNAIENERKTYGPYFSEDYKFVKTALKEGKTEKELSKKFAAVIKVLKMVSEVVPFIGKELRLSDEAQSKFDNLYSLAQLYNLIETERNGFSKVSLAAHLENAWRMTMTDGSAQCCRLPADCVRPFDGFIRKAIDRNSWEVAKRIAEEVKKSVDFTNGTVKIPVAIEANSFNFTASLTDLKYIQLKEQKLKKKLEDIQRNEENQEKRWLSKEERIRADSHGICAYTGRPLDDVGEIDHIIPRSLTLKKSESIYNSEVNLIFVSAQGNQEKKNNIYLLSNLAKNYLAAVFGTSDLSQITNEIESTVLQLKAAGRLGYFDLLSEKERACARHALFLNSDSEARRAVIDVLGSRRKASVNGTQAWFVRSIFSKVRQALAAWTQETGNELIFDAISVPAADSSEMRKRFAEYRPEFRKPKVQPVASHSIDAMCIYLAACSDPFKTKRMGSQLAIYEPINFDNLFTGSCQVIQNTPRNFSDKTNIANSPIFKETIYAERFLDIIVSRGEIFIGYPSNMPFEEKPNRISIGGKDPFSILSVLGAYLDKAPSSEKEKLTIYRVVKNKAFELFSKVAGSKFTAEEDKAAKILEALHFVTVKQDVAATVSDLIKSKKELSKDSIENLAKQKGCLKKVEYSSKEFKFKGSLIIPAAVEWGKVLWNVFKENTAEELKDENALRKALEAAWPSSFGTRNLHSKAKRVFSLPVVATQSGAVRIRRKTAFGDFVYQSQDTNNLYSSFPVKNGKLDWSSPIIHPALQNRNLTAYGYRFVDHDRSISMSEFREVYNKDDLMRIELAQGTSSRRYLRVEMPGEKFLAWFGENSISLGSSFKFSVSEVFDNKIYTENAEFTKFLPKPREDNKHNGTIFFELVGPRVIFNYIVGGAASSLKEIFSEAGKERS

SEQ ID NO: 214 - protein, 1371 aa, Lactobacillus buchneri
MKVNNYHIGLDIGTSSIGWVAIGEDGKPLRIKGKTAIGARLFQEGNPAADRRMFRTTRRRLSRRKWRLKLLEEIFDPYITPVDSTFFARLKQSNLSPKDSRKEFKGSMLFPDLTDMQYHKDYPTIYHLRHALMTQDEKFDIRMVYLAIHHIVKYRGNFLNSTPVDSFKASKVNFVDQFKKLNELYTAINPEESFQINLANSEDIGHQFLDPSIRKFDKKKQIPKIVPVSVDDKATDKINGKIASEIINAILGYKSKLDVVVQCTPVDSKSWALKFDEEDIDAKLQKILPEMDENQQSIIAILQNLYSQVTLNQIVPNGMSLSESMIEKYNDHHDHLKLYKKIIDQLADPKKKAALKKAYSQYVGDDGKVIEQADFWSSVKKNLDDSDLSKQIMDLIDAEKFMPKQRTSQNGVIPHQLHQRELDEIIEHQSKYYPWLAEINPNKHDLHLAKYKIEELVAFRVPYYVGPMITPDDQAKSAETVFSWMERKGKEAGQITPWNFDEKVDRNASANRFIKRMTTKDTYLIGEDVLPDESLLYEKFKVLNELNMVRVNGKLLKVADKQAIFQDLFENYKHISVKKLQNYIKSKTGLPSDPEISGLSDPEYFNNSLGTYNDFKKLFGNKVDEPDLQDDFEKIVEWSTVFEDKRILREKLNEITWLSDQQKDVLESSRYQGWGRLSKKLLTGIVNDQGERIIDELWNTNKNFMQIQSDNDFAKRIHEANADQMKAVDVEDVLADAYTSPQNKKAIRQVVKVVDDIQKAMGGVAPKYISIEFTRSEDRNPRRTISRQRQLENTLKDTAKSLAKSINPELLSELDNAAKSKKGLTDRLYLYFTQLGKDIYTGKPINIDEISTYDIDHILPQAFVKDDSLNNRVLVSKAINNGKSDNVPVQLFGAKMGHFWKQLAEAGLISKRKLKNLQTDPDTISKYAMHGFIRRQLVETSQVIKLVANILGDKYRNDNTKIIEITARMNHQMRDEFGFIKNREINDYHHAFDAYLTAFLGRYLYHRYIKLRPYFVYGDFKKFKEDKVTMRNFNFLHDLTDDTQEKIADAETGEVIWDRENSIQQLKDVYHYKFMLISHEVYTLRGAMFNQTVYPASDAGKRKLIPIKADRPINVYGGYSGSADAYMAIVRIHNKKGDKYRVVGVPMRARDRLDAAKKVSDADCDRALKDVLTPQLTKTKKSRKTGEITQVVEDFEIVLGKVMYRQLMIDGDKKFMLGSSTYQYNAKQLVLSDQSVKTLASKGRLDPLQESMDYNNVYTEILDKVNQYFSLYDMNKFRHKLNLGFSKFISFPNHNVFDGNTKASSGKREILEEVLNGLHANPTFGNLKDIGITTPFGQLQQPNGILLSDEAKIRYQSPTGLFERTVSLKDL

SEQ ID NO: 215 - protein, 1090 aa, Sphingomonas sp.
MDWRLGLDLGANSLGWAALRLDRAGDPIGILAMGSRIFSDGRDPKSGASLAVDRRAARAMRRRRDRFKQRQAALLKYLIRDGLFPADQADRQRLADEDPYALRARALDEELSLFEIGRALFHLNQRRGFQSNRKADRGQDDEAGKIAVGVDRLNQQMEEQGARTLGEFLHQRRRAATDANHIPSVRTRLRPETGEGAKGDGYDFYPSRALIAEEFEEIWAAQAPHYPDTLTQQVHDRLYEIIFHQRPLRAPQVGQCTLVAGETRLPKAHPLFQKRRLLEEINALMIVRPGEIAQRLTPEERDTLYLKLKDKRTVSFATLRKTLKLDSAARFNKESENRTELKGDEVAAELGAKTRLGTRWQHLSGDQQWEVVHRLMALESQADEAAFRDWISQTYDLLPEQAAAVLGARLPQGHGRFGPTATTTLIDSLLHDRTEDGRVVVYSEAVQRSGLGHHSDLRHDRDDEDVTELPYYGVALERHIMPGTAEPTDPEEMRIGRLTNPTVHIGLNQLRHVVNRLIRAYGPPKEIAIELARELKLSEDEKKKRNSENRDNRLAAEGRSKKLEEIRQRDTGANRALLKLWEELNPGNVLDRRCIYTGEQISIDMLFSDRVEVDHILPFAQTLDDSNGNKLLCLREANREKRRRSPYEAWGHTDRWPDIAERASRLPKPKRWRFEPDAMQRFATEDGFLARHLVDTQYLGRLAREYLSWLYPGRGEGSGHVWVSPGRLTEMVRRKLGLNDLLPDHNFGGGADQPKNRLDHRHHAIDALVVAIVDRGMLQAIARASGQDGSEGRERIHIPAPWDGFRDDLRVAVNGIIVSHRPDHGTVAKAGLARGRDQTAGRLHNDTAYGLTGETDAKGNSIVVRRIPLSAIKKPADIARVRDPLLRNALAEFTKGLDGKAFEARIGRFHELGPLLYRGIRRVRVVETLTVIPIRDAEGRAYKGYKGDSNYRYDVWEMPDGKWRCQVVSMFDAHQSTEQARPHPAARKILSLQRNDILAIERTEGDRELVRVVKFSEKQFAVAPPHEGGSLKTRDGNADDPFRYLYPSPNTLKGWRARQVRIDELGRVLDPGFPARKSVRRTRPRAAPVD

SEQ ID NO: 216 - protein, 1000 aa, Kingella kingae
MARAQRRLISRRANRMNKLRRLLKQENVLQANDYDEKGLIIGLPNQAWELRAQGLDRKLEPKEWAAVLINLVKHRGYLSQRKNESQTADKELGALLSGMNHNHQLLQSQSNQYRTPAELAIKQFATQDGHIRNQRGAYTHTFNRLDLQNELNQLFDAQTRLGNPHVSGSLKTAINDLLMNQKAALSGDAILEMLGRCTFEPSEYKAAKNTYSAERFVWLGKLTNLRIQDNGLESALSREQRELLLNEPYNKTKLTYQQVRKLLRLPETAFFKGLRYGKDNAESATFMEMKSYHAIRKSLENKSLKSEWEKLKTQPKLLDLIGTAFSIYKTDDEIAGCLKNQLPENVIIALQEQLNFSNFMELSLKALEKLLPLMEQGLRYDEACTQIYGNRHEKIADKTEKFLPNIPADKLRNPVVLRTLTQARKVINAIIRRYGSPARVHIETGREVGKSFSDRDKLKKQQEENQEQRRRAIDEWKQFFPNAAHEPKAVDILKLRLYQLQQGKCLYSGLPIDVRRLPEKGYVEIDHALPFSRTWDDSFNNKILVLASENQNKGNQTPYEYLRGADNSESWRLFVENVQNCQFSPNKKQKIMAKQLDEKGFLERNLNDTRYVSRFLCQFISEHLHLTGKGKKRVFASNGQITALLRGRWGLSKNREENDRHHAVDAVVVACSTVAMQQKITQFVRYQKGNVFTGERIDKETGEVISIHFPTPWEHFREEVMIRVFDDNPLRTLPEKLPNRPEALHEYVMPLFVSRMPTRKMTGQGHKETIKSAKRLDEKISVLRVPLTQLKLNDLENMVNREREPALYEALKARLEQFKNDPAKAFAEPFFKQGGQQVKAVRVEIVQKSGMLLRKINGVADNGSMVRVDVFEKSGKFYLVPIYAWQVAEGILPNYAVVAHKDESDWILMDESYHFKFALYKNDLLEVQTKKGGIMGYFASLDRATGAITIREHDRDKKKCKDGEHRSIGVKMASSFKKLQVDELGKNIHETRSRKRPNIG

SEQ ID NO: 217 - protein, 1130 aa, Streptococcus pasteurianus
MTNGKILGLDIGIASVGVGIIEAKTGKVVHANSRLFSAANAENNAERRGFRGSRRLNRRKKHRVKRVRDLFEKYGIVTDFRNLNLNPYELRVKGLTEQLKNEELFAALRTISKRRGISYLDDAEDDSTGSTDYAKSIDENRRLLKNKTPGQIQLERLEKYGQLRGNFTVYDENGEAHRLINVFSTSDYEKEARKILETQADYNKKITAEFIDDYVEILTQKRKYYHGPGNEKSRTDYGRFRTDGTTLENIFGILIGKCNFYPDEYRASKASYTAQEYNFLNDLNNLKVSTETGKLSTEQKESLVEFAKNTATLGPAKLLKEIAKILDCKVDEIKGYREDDKGKPDLHTFEPYRKLKFNLESINIDDLSREVIDKLADILTLNTEREGIEDAIKRNLPNQFTEEQISEIIKVRKSQSTAFNKGWHSFSAKLMNELIPELYATSDEQMTILTRLEKFKVNKKSSKNTKTIDEKEVTDEIYNPVVAKSVRQTIKIINAAVKKYGDFDKIVIEMPRDKNADDEKKFIDKRNKENKKEKDDALKRAAYLYNSSDKLPDEVFHGNKQLETKIRLWYQQGERCLYSGKPISIQELVHNSNNFEIDHILPLSLSFDDSLANKVLVYAWTNQEKGQKTPYQVIDSMDAAWSFREMKDYVLKQKGLGKKKRDYLLTTENIDKIEVKKKFIERNLVDTRYASRVVLNSLQSALRELGKDTKVSVVRGQFTSQLRRKWKIDKSRETYHHHAVDALIIAASSQLKLWEKQDNPMFVDYGKNQVVDKQTGEILSVSDDEYKELVFQPPYQGFVNTISSKGFEDEILFSYQVDSKYNRKVSDATIYSTRKAKIGKDKKEETYVLGKIKDIYSQNGFDTFIKKYNKDKTQFLMYQKDSLTWENVIEVILRDYPTTKKSEDGKNDVKCNPFEEYRRENGLICKYSKKGKGTPIKSLKYYDKKLGNCIDITPEESRNKVILQSINPWRADVYFNPETLKYELMGLKYSDLSFEKGTGNYHISQEKYDAIKEKEGIGKKSEFKFTLYRNDLILIKDIASGEQEIYRFLSRTMPNVNHYVELKPYDKEKFDNVQELVEALGEADKVGRCIKGLNKPNISIYKVRTDVLGNKYFVKKKGDKPKLDFKNNKK

SEQ ID NO: 218 - protein, 1119 aa, Lactobacillus coryniformis
MGYRIGLDVGITSTGYAVLKTDKNGLPYKILTLDSVIYPRAENPQTGASLAEPRRIKRGLRRRTRRTKFRKQRTQQLFIHSGLLSKPEIEQILATPQAKYSVYELRVAGLDRRLTNSELFRVLYFFIGHRGFKSNRKAELNPENEADKKQMGQLLNSIEEIRKAIAEKGYRTVGELYLKDPKYNDHKRNKGYIDGYLSTPNRQMLVDEIKQILDKQRELGNEKLTDEFYATYLLGDENRAGIFQAQRDFDEGPGAGPYAGDQIKKMVGKDIFEPTEDRAAKATYTFQYFNLLQKMTSLNYQNTTGDTWHTLNGLDRQAIIDAVFAKAEKPTKTYKPTDFGELRKLLKLPDDARFNLVNYGSLQTQKEIETVEKKTRFVDFKAYHDLVKVLPEEMWQSRQLLDHIGTALTLYSSDKRRRRYFAEELNLPAELIEKLLPLNFSKFGHLSIKSMQNIIPYLEMGQVYSEATTNTGYDFRKKQISKDTIREEITNPVVRRAVTKTIKIVEQIIRRYGKPDGINIELARELGRNFKERGDIQKRQDKNRQTNDKIAAELTELGIPVNGQNIIRYKLHKEQNGVDPYTGDQIPFERAFSEGYEVDHIIPYSISWDDSYTNKVLTSAKCNREKGNRIPMVYLANNEQRLNALTNIADNIIRNSRKRQKLLKQKLSDEELKDWKQRNINDTRFITRVLYNYFRQAIEFNPELEKKQRVLPLNGEVTSKIRSRWGFLKVREDGDLHHAIDATVIAAITPKFIQQVTKYSQHQEVKNNQALWHDAEIKDAEYAAEAQRMDADLFNKIFNGFPLPWPEFLDELLARISDNPVEMMKSRSWNTYTPIEIAKLKPVFVVRLANHKISGPAHLDTIRSAKLFDEKGIVLSRVSITKLKINKKGQVATGDGIYDPENSNNGDKVVYSAIRQALEAHNGSGELAFPDGYLEYVDHGTKKLVRKVRVAKKVSLPVRLKNKAAADNGSMVRIDVFNTGKKFVFVPIYIKDTVEQVLPNKAIARGKSLWYQITESDQFCFSLYPGDMVHIESKTGIKPKYSNKENNTSVVPIKNFYGYFDGADIATASILVRAHDSSYTARSIGIAGLLKFEKYQVDYFGRYHKVHEKKRQLFVKRDE

SEQ ID NO: 219 - protein, 1126 aa, Lactobacillus farciminis
MADRISLGLDIGVASVGFSVLDIDKGKVIELGARLFSATVAAGNQDRRDMRGARRLLNRNKQRRQDTGKLFKKFGLIDDFDKGSFYDNFNQNLNPYELRVKGLTEQLTKEELAESLYQIVKHRGISYALKDADVDEGGTDYSVSLKINSQELAEKTPAQIQLQRLNDYGKVRGQVVIGDDPDNQKVLLNVFPTSAYEKEAKQIIATQQQFYPESLTDKFTEEYCQILTRKRDYFVGPGNEKSRTDYGIYKTDGRTLDNLFEELIGHDKIYPEELRASAASYTAQLFNVLNDLNNLRILNYEDGKLTKEDKEKIIAEIKNNTTTINMLNVIKKVAGCSKDDIKGFRVNEKDKPEISSMPVYRKIHKDLLKAGVDISDWPVEFIDELSFILTLNTENGEIRKQLNNRLAPKFDFLNADLIQLIIDNKDSFEIKTNNKWHRFSVKTMNKLIPEMMERPVEQMTLLNEMGLVKKDKKRFENNKYLPYKEIAKDIFNPVASKSVREALKIVNAVLKKYGHIDYLVVEMPRDKNLKEEQDNIKEFQNKNKKAKDAAFEAFVKSVGSEQRVKEALSKNRKLQMKMRLWYQQQEIDPYNGKTIDATDLINNPDKFEIDHIIPQSISFYDSINNKTLCFASMNQVKGQKTPYEFMLEGHGQSYDKFKATVMANKNFGKAKRANYLFEENVSDIETRKRFLSRNLVDTRYSSRVVLNSLQDFFREKSADTKVTVIRGKFTSNMRKHWHIDKTRETFHHHAIDASIIAATPFLRMWKKGGTIFPVKVGEESIDIETGEILDDKNFDKAMYEEPYSGFVSEIMNADDRIKFSHQVDKKMNRKVSDATIYSTRTGKLAKDKKDAEYIVAKVKDIYSVDGFKKFKKVYDKDKTKFLLYKYDPRTFSKLERIISDCPDKVEKVQTNGKVKAVDISPFEMYRRDHGMIKKYSKKGNGPAIKQLKYLDKKLGSHIDITPANANGKHVILQSLKPWRTDVYLNHETGEYEIMGIKYSDLKFNKNEGYGIKKDKYLEIKKVEEVSEKSEFMFSLYRKDRVKVQDMKTGESVELLFWSRNFSNKKYAELKPISQAENDKKLPVYGKGRLIKRLIPKNCKIWKVNTTILGDPYYLEKESDSPKDILD

SEQ ID NO: 220 - protein, 1380 aa, Eggerthella sp.
MNLRHVGNYNIGLDMGTASVGWAAIDEQGELLHFKGKPTWGSRLFDSANTAATARMPRGQRRRYIRRRWRLDLLQKFFSEEMAEKDPEFFIRLRQSSLWPEDREGGHTAYHWPLFNDSDFNEKEYYEKFPTIFHLRQWLMETDEKADIRLIYLAFHNIVKHRGNFLQENNDSLSAQNANMRESLESFCIALEEWCDEKELTCSCDPQKLEHLFKEVKYRSDIRDGFAALLGLACSGENEVDVKAMAKEMGKAIVGYKADFSKIFTECDKEGSSFRLSDDEGPEAFLDICPDDGIALFEAIQMVYSSFILTGMLTEKGLSLSKISAYNQYGQDLESLKALVKEYVPNEYSSFFRGPTYSGSTEYDPSKAQGYTRYNLGPSKKGSGAKPMAYEDFKKSVEQLFANTNAINDERYKEMMGRFAEEKFLRRLRTSDNGRIPFQLNLEEMTAIIINQGKYYPFLLEQQEKLESLVRFRIPYYVGPLTRINARLDSKGNACFAWSKRKDGMDSASIKPWNWDEVIDKHASAQAFIERMTGTCTYLRGEPVLPRCSLLYEEYCVLNELNGARWTQDGDKFIRFDYKDRSDIIEELFKKRRGRIQYAAVADWMKQERSHANVHVSGGQGENAFESRLSSYHFFCNDVFGVDELPGSYVDMVEEIILWSTLFEDRSILREEIQRKYGDVLNEEQIKTICKKRFSGWGRLSRKLLCSLKAQTDNGPKSIMDILQEGDQNNGRVGRAMVFQEILHDEQLGFEQKIEEENTQSMLEGENLLIEDLPGSPAIRRSINQAVRIVDEIVGIAGHAPDNIFIEVTREDDTKKKGKRTTTRYSNIQKALEALKEEGAEALRELKTYKHNELDKRLSLYFMQNGKSLYSGIPLDIRRLSEYQIDHIIPQSYIKDDSYENMALVLPGENQSKADNLLISQDIRIKMKATWTALHKAGLMGDKKYNNLMNSSISDAKMKGFINRQLVETSQSVKLTQMMLSQKYPGAKVRPIKASISSQLRDACDLVKCREANDYHHAHDAYLACQVGRFVLKRHSSMFDNPIGMTKVIRDFVKRQGQEFKRNGKLPAYASRSGFIVQSFMRSGFDAETGELLRDDWNAPFEIARIKRCLNYRDCYISRMPMEDSGAFWDATIYSPKAGKKGALPVKQGLPVEKYGSYSREQFAYFFVYKAYNPKKKAYRLEFEAVPVRVASAVETRENALEEYAKSVAKQAGLEFVEVARPKVYKYQLIELGEDRLYITGKREVRNASQLAFSLDEIDLLKRLAEGEETSSEERERLFDVLIEKYARYAPRLARQLSVDSMSATFETLNAEEQLGILLSLVEIANGKRNMIDLSSAGGSKNAGCMNPTFSSELSSPGSNFTFIDQSVTGMFERRQRLEL

SEQ ID NO: 221 - protein, 1430 aa, Capnocytophaga canimorsus
MKHILGLDLGTNSIGWAVVKEAQNDNEQSEIVDVGVRVNPLTTDEKTNFEKGKPISTNADRTLKRSARRNLQRYKLRRKELIELLKEHQLISTDTILTENGKGTTFQTLELRAKSAKEKISLEELARVFLTINKKRGYKSSRKAKNEDEGQLIDGMEIAKRLYEENLTTGQLSLQLLKEGKKSLPDYYRSDLQFELDKVWNFQKQFHSHILTDEFYAQLKGKGQRATSALFLAKYQIYTAENKGSREDKKLQAYQWRVDALSKELTREQLAFVITEINNNLNNSSGYLGAISDRSKELYFNNETVGEYLWKQIAANPHTSLKNQVFYRQDYLDEFEQIWKTQSAFYPEILTDELKKELRDVVIFYQRKLKSQKSLVSFCEFENKEIEIKKEDGTSTKKVIGLKVAPKSSPLFQEFKIWQNLNNVLIRKKGSKTKKVDKNQQAVLFEEEKTIFELDLEAKQALFNELNLKGNLKAYYCLEILGYSPKEWEMNYSVLEGNRTNKALYEAYLKITDLEGYDAKNHLKVKLNKDEVELDDLKVPASEIKDMVQAIFKEAGINTDILHFNAELDGKDFENQASYQLWHLLYSYEGDDSKSGNELLYKLLETKFGFKKEYAQILANVSLSDDYGSLSTKAMRKIHPYIKENKFSTACELAGYRHSKHSLTKEENDNRVLKDSLEVLKKNSLRQPVVEKILNQMINLVNALLKKYRTENPNFKFDEIRIELARELKKNAEERANMTVNINKAKTEHEKIIKILKNEFGLPNPTRNDIIRYRLYEELKANGYKDLYTNEYIEKQDLFTKNIDIEHIIPKSRVFDDSFSNKTLSFRKTNLDKGERTAFDYIESKFGADKLEEYVARVEDLYKNNIISKAKYQKLLKKESEIGDGFVERDLRETQYIAKKAKEILLQITPNVLSTSGGITDRLREDWDLINVMKELNLPKYRALGLTQMEDRKYGQQVEVIIDWTKRNDHRHHAMDALTVAFTKHNHIQYLNYLNARKNEKHREHSNIMGIQQLETIKVTDKNGNEKRVFKAPMPNFRQVTKAFLENVLISHKAKNKVVTKNKNKVAGSNKVQEVLTPRGQLHKETVYGKYQYYVQKEEKIGGKFDLETIKKVANPLYQSLLKKRLEENGGDPKKAFTGKNSLAKNPIYLDDAQTEQLPEKVKLVWLENSFSIRKDITPENFKDEKLIDKILDEGVKRILKERLQSFGNDAKKAFSDLDKNPIWLNKEKGIAIKRVAISGVANAEPLHTKKDHLGKEILDKEGKSIPVDFISTGNNHHVAVYRDEKGNLQEKVVSVFEAVVRANQGLPIIDKTYNQHLGWEFLFTMKQNEMFVFSNESTGFNPNDIDLLDPKNKKIISPNLFRVQKFSKLQYGNSFVREFVFRHHLETTVEDRKELQGITYKQMKNSAFFNDIIKVRINHLGGIVSVGEY

SEQ ID NO: 222 - protein, 1348 aa, Finegoldia magna
MKSEKKYYIGLDVGTNSVGWAVTDEFYNILRAKGKDLWGVRLFEKAKTAADTRTFRSGRRRNDRKGVRLQILREIFEDEIKKVDKDFYDRLDESKFWAEDKKVSGKYSLFNDKNFSDKQYFEKFPTIFHLRKYLMEEHGKVDIRYYFLAINQMMKRRGHFLIDGQISHVTDDKPLKQQLILLINDLLKIELEEEFMDSIFEILADVNEKKTEKKNILKELINAQDFNKQEGKILYSIFESIVTGKAKIKNIISDEDILEKIKEDNKEDFVLTGDSYEENLQYFEEVLQENITLFNTLKSAYDFVILQSILKGKSTLSDAQVERYDEHKKDLEILKKVIKKYDEDGKLFKQVFKEDNGNGYVSYIGYYLNKNKKITAKKKISNIEFTKYVKGILEKQCDCEDEDVKYLLGKIEQENFLLKQISSINSVIPHQIHLFELDKILENLAKYYPSFNNKKEEFTKIEKIRKTFTFRIPYYVGPLNDYHKNNGGNAWIFRNKGEKIRPWNFEKIVDLHKSEEEFIKRMLNQCTYLPEETVLPKSSILYSEYMVLNELNNLRINGKPIDTDVKLKLIEELFKKKTKVTLKSIRDYMIRNNFADKEDFDNSEKNLEIVSNMKSYIDFNNILGDKFELEMVEDLIEKITIHTGNKKLLKKYIEETYPDLSSSQIQKIINLKYKDWGRLSRKLLDGITGTNIETGEIDTVINFLRNSSDNLMQIIGSQNYSFNNDIDKLRKKYIPQEISYEVVENLYVSPSVKKMIWQVIRITEEITKVMGYDPDKIFIEMAKSEEGKKTTISRKNKLLALYKAIKKDERDSQYEKLLTGLNKLDDSDLRSRKLYLYYTQMGRDMYTGEKIDLDKLFDSTHYDKDHIIPQSMKKDDSIINNLVLVNKNANQTTKGNIYPVPSSIRNNPKIYNYWKYLMEKEFISKEKYNRLIRNTPLTNEELGGFINRQLVETRQSTKAIKELFEKFYKKSKIIPVKAILASDLRKDMNTLKSREVNDLHHAHDAFLNIVAGDVWNREFTSNPINYVKENREGDKVKYSLSKYFTRPRKSKGKVIWTPEKGRKLIVDTLNKPSVLISNESHVKKGELFNATIAGKKDYKKGKIYLPLKKDDRLQDVSKYGGYKAINGAFFFLVEHTKSKKRIRSIELFPLHLLSKFYEDKNTVLDYAINVLQLQDPKIIIDKINYRTEIIIDNFSYLISTKSNDGSITVKPNEQMYWRVDEISNLKKIENKYKKDAILTEEDRKIMESYIDKIYQQFKAGKYKNRRTTDTIIEKYEIIDLDTLDNKQLYQLLVAFISLSYKTSNNAVDFTVIGLGTECGKPRITNLPDNTYLVYKSITGIYEKRIRIK

SEQ ID NO: 223 - protein, 1352 aa, Megasphaera sp.
MKKRNREEYYVGLDIGTSSVGWAVATPDYRIPKFRGHKMWGSRLFAEGKRAAERRQFRTNRRRLARRRDRLQILEELFAEEMAKVDNTFFMRLKESKFFLEDKTVKEKHILFSTDKFDADRFYKDNPTIYHVRKRLMEEEPQDIRELFLAVHHILKYRGHFLFAGSLEQNGASIEELVRTLLGKQGLAILDDTIDSNEMVNILKNTGETKSDRKKDVQELWNPLKDKVKKAQAAEMAGLVLGLKSDISKLFANSDYKDLDSSIKNINFSSGDYEEKRDDYANSIGDDIVLLDTMKALYDTLILSQILQGKRSISAAKVEDYNTHKEQLRALKAILKPHKRLYNEMFRENNKKDLSNYVAYISSYSEGKRVNREGFYKYVQAVLKQVDDSDSKQAILEAIRLETFLPLLRVKDNAVIPHQIHQAELEAILETARKKYNFLNDVSDGVSVKDKIIQLFTFRIPYYVGPLNPHSGETVADRKQGTGWVVRKQRGKVYPWNFADMVDVKASAEAFITNLTNKCTYLIGEDVLPKRSLLYSEFMLLNELNMIKYDGHELPVAIKQLYIEQVFKQEHKKQTKGRVLDFLKRNGLITGSATAVITGMDDAIKGDLQSYRDMVRIFGAGFDHSMAERIIRWVTLFGEAKDILENKIREVYGNSISDSQMRAIKKLKYADWGRLSQAFLIAVKGCDKSGVERNIITCLRASSQNLMEILSDQGTYIKQIKAWNHQHTTNMMDTLDYQLVDDLYVAPSVKRSIWQSLCIVEELVKIMGQAPKKIFVEVTRTKQAEKTKKDSRKKRLVELYTAIGKEGAAWKKEIEAHQAGDFRRKKLYLYYTQMGRCMYSNEPIAMDALFTSAYDIDHIYPQSLTKDGSWDNLVLVKSQLNKEKSDQYPLRPAIREKNKAHWQYLCRAGFISEKKYERLMRTTELTAEELSGFIARQLVETSQATKAVTGLLERIYTNTEICFVKAETVSQFRHQHNFIKIRELNNYHHAKDAYLNIVVGNVYHEKFTKNPWEFIARSTERRPYNLNRMYDFDLLKQGRVIWQVPKSLETVQAMMKSNDVRITKKLLVQKGELYDATITKAHKAKEGTYFPLKGADARLRDVHRYGGYEKIKIAYYSVFSCREKASNTIHTLIIPIPVYKAGLLQTEADLTAYAWQTKQKTKPIKDIYSAITPIYKKLCINTVVKIDGFKYFLGGKTGDYMWLDPAIPVVLDEQAAAYLKAISKVGRADDVENTAQAIDLITAEANEAFYDVLLKKMEAKIFAKAYQTIVEKLASETARERFRELSIGAQCSCLLEILNLLANNKTTFTFFKDKMGVTMSRRKQPMDLTKLEECIVYETSITGLYEKAVSLL

SEQ ID NO: 224 - protein, 650 aa, Haemophilus pittmaniae
MENKNLHYILGLDLGIASVGWAVVEIDKEENPLCLIDVGVRTFERAEVPKTGESLALSRRLARSARRLTQRRVARLKKAKRLLKLENILLSTDERLPHQVWQLRVEGLDRKLKRQEWAAVLLHLIKHRGYLSQRKNESKSENKELGALLSGVASNHELLQQTTYRTPAELAVKKFEVEEGHIRNQQGAYTHTFSRLDLLAEMELLFSRQQHFGNPFASEKLLENLTALLMWQKPALSGEAILKMLGKCTFEDEYKAAKNTYTAERFVWITKLNNLRIQENGLERALNDNERLILIEQPYEKAKLTYAQVRSILNLSDEAIFKGLRYSGEDKKAIETKTTLMEMKAYHQIRKVLEGNNLKAEWTELKENSTLLDEIGTAFSLYKTDEDISTYLAGKLSQPVLNALLENLSFDKFIQLSLKALYKLLPLMQQGLRYDEACHEMYGDHYGKKTYGKKTEENHYFLPQIPADEIRNPVVLRTLTQARKVINGVVRLYGSPARIHIETGREVGKSYKDRRELEKRQEENRKQRENAIKEFKEYFPHFAGEPKAKDILKMRLYKQQNAKCLYSGKPIELHRLLEKGYVEVDHALPFSRTWDDSFNNKVLVLANENQNKGNLTPFEWLDGKHNSERWRAFKALVETSAFPYAKNNAS

SEQ ID NO: 225 - protein, 1062 aa, Ralstonia syzygii
MAEKQHRWGLDIGTNSIGWAVIALIEGRPAGLVATGSRIFSDGRNPKDGSSLAVERRGPRQMRRRRDRYLRRRDRFMQALINVGLMPGDAAARKALVTENPYVLRQRGLDQALTLPEFGRALFHLNQRRGFQSNRKTDRATAKESGKVKNAIAAFRAGMGNARTVGEALARRLEDGRPVRARMVGQGKDEHYELYIAREWIAQEFDALWASQQRFHAEVLADAARDRLRAILLFQRKLLPVPVGKCFLEPNQPRVAAALPSAQRFRLMQELNHLRVMTLADKRERPLSFQERNDLLAQLVARPKCGFDMLRKIVFGANKEAYRFTIESERRKELKGCDTAAKLAKVNALGTRWQALSLDEQDRLVCLLLDGENDAVLADALREHYGLTDAQIDTLLGLSFEDGHMRLGRSALLRVLDALESGRDEQGLPLSYDKAVVAAGYPAHTADLENGERDALPYYGELLWRYTQDAPTAKNDAERKFGKIANPTVHIGLNQLRKLVNALIQRYGKPAQIVVELARNLKAGLEEKERIKKQQTANLERNERIRQKLQDAGVPDNRENRLRMRLFEELGQGNGLGTPCIYSGRQISLQRLFSNDVQVDHILPFSKTLDDSFANKVLAQHDANRYKGNRGPFEAFGANRDGYAWDDIRARAAVLPRNKRNRFAETAMQDWLHNETDFLARQLTDTAYLSRVARQYLTAICSKDDVYVSPGRLTAMLRAKWGLNRVLDGVMEEQGRPAVKNRDDHRHHAIDAVVIGATDRAMLQQVATLAARAREQDAERLIGDMPTPWPNFLEDVRAAVARCVVSHKPDHGPEGGLHNDTAYGIVAGPFEDGRYRVRHRVSLFDLKPGDLSNVRCDAPLQAELEPIFEQDDARAREVALTALAERYRQRKVWLEELMSVLPIRPRGEDGKTLPDSAPYKAYKGDSNYCYELFINERGRWDGELISTFRANQAAYRRFRNDPARFRRYTAGGRPLLMRLCINDYIAVGTAAERTIFRVVKMSENKITLAEHFEGGTLKQRDADKDDPFKYLTKSPGALRDLGARRIFVDLIGRVLDPGIKGD

SEQ ID NO: 226 - protein, 1052 aa, Haemophilus parainfluenzae
MENKNLHYILGLDLGIASVGWAVVEIDEKENPLRLIDVGVRTFERAETQKGESLALSRRSARSARRLTQRRVARLKKAKRLLKSENILLSTDERLPHQVWQLRVEGLDRKLERQEWAAVLLHLIKHRGYLSQRKNESKSENKELGALLSGVASNHELLQQATYRTPAELAVKKFEVEEGHIRNQQGAYTHTFSRLDLLAEMELLFSRQQHFGNPFASEKLLENLTALLMWQKPALSGEDILKMLGKCTFEDEYKAAKNTYTAERFVWITKLNNLRIQENGLERALSDNERLMLIEQPYEKAKLTYAQVRSILNLSDDAIFKGVRYSGEDKKAIETKTTLMEMKAYHQIRKVLEGNNLKAEWVALKANPTLLDEIGTAFSLYKTDEDISAYLAGKLSQPVLNALLENLSFDKFIQLSLKALYKLLPLMQQGLRYDEACREIYGDHYGKKTEETHHFLPQIPADEIRNPVVLRTLTQARKVINGVVRLYGSPARIHIETGREVGKSYKDRHELKKRQEENRKQREKTISEIKTLFPNFSGEPKGKDILKMRLYYQQNAKCLYSGKPLELHRLFEQKYVEVDHALPLSRTWDDSFNNKVLVLANENQNKGNLTPFEWLDGKNNSERWRTFKALVETSAFPYAKKQRILSQKLDEKGFIERNLNDTRYVARFLCNFIADNMHLTGEGKRKVFASNGQITALLRRRWGLAKSREDNDRHHALDAVLVACSTVAMQQKITRFVRFKAGDVFTGERIDRETGEIIPLHFPTPWQFFKQEVEIRIFSDNPKLELENRLPDRPQANHEFVQPLFVSRMPTRKMTGQGHMETVKSAKRLNEGISMIKMPLTKLKLKDLELMVNREREKDLYDALKTRLEAFNDDPAKAFAEPFMKKGGAIVKSVRVEQVQKSGVLVRQGNGVADNASMVRVDVFTKDGKYFLVPIYTWQVAKGILPNKAVIQGKDEEDWEDIDDATFQFSLHPNDLISVKTKKDEFLGYFNGLNRHTGGINIRTHDLEKSKGKQGIFEGIGVKIALSFEKYQIDELGKNIRLCKPSKRQPVR

SEQ ID NO: 227 - protein, 1331 aa, Lactobacillus sanfranciscensis
MNKQPYNIGLDIGTSSVGWSATELDNRLLHIKGHNGIGVRLFKEGESAADRRGFRTTRRRLARRKWRLRLLNEIFATEIAKVDPSFFARLKQSNVSPKDPNKTMFENILFDDENLDDQKFHHDYKTIYHLRQAIINHPEQKFDIRLIYLAMHHIIKYRGHFLNQANVQDFKGGKIDLEKSFKALNDIFENQGRDLRLVTDKANQYVKVLSDNAKTRSDRKKELSKLLYVPIDKDTDKNSKKVTGEILKAILGNKAKFDVIFGIEVENPKEWVLTFNSDDFDDKIEGLSSQMTDEDSEILLILKELYFALNLSDILNNSVTDKNAKTLSEAMINRYDDHKNQLAMLKKVIDSSDKKHAKELKEAYSAYIDGENNKKISFEDLKKRIQKNLVDSELSQKINDLLDHDYFLPKQRSKENGAIPHQLQQQELDQIIESQKQYYPFLAELNPNEKRSRQAKYKLDELVAFRVPYYVGPMVEVTDSNQENNGKFAWMIRKEQGEITPWNFDEKVDRTETATKFITRMTTTDTYLIGEPVLPKNSLLYQKFVVLNELNNLKINQEIITPGQKQYLYEHVMKKNKRVTLKKIADALVIKGDYPYAPEVKGTTDQKNLNNGLTTYIDLAKIFGNELDDVDREADFEKIIEWSTIFEDQHIFALKLQELKWLTEKQRNQVVKLRYQGWGKLSKELLAGLVDDNGQRIIDLLWSDNQNFMQIVNQKSFKESIADHNGAHLEEKNLKDVINDLYTSPQNKKAIRQVILVVDDIINAVGYEPANIMMEFAREDSNDHRLTNSRSRQLENVYKDITNSWFDNDSVKDELEDKIKNKDKFTDRLYLYFTQGGKDLYTGEPLNIDDLSSYDIDHILPQSFILDNSLDNRVLTSQRNNRVSKEDQLPGELFGTKMHAFWKRLKAAHLISNKKYYNLTLTPNSISKFNNQGRFINRQLVETRQVIKLAAEILHNRYSEEKGTNIVTIKANLTHHMREKFNFYKNRNVNDYHHAFDAYLTAFVGNWLLQQYPKLKPYFVYGDFAKTEINNLKSFNMLYKFEQAHQLNEKDGKIAKDADALLGYMKNVYHFKKMLVTKKLETNHGALFKQTLYPSPAHDIKKRQLIKPKDNRPTDIYGGYTHEERKYMSLVKVIGKKDNEYRMANVPLLKINKNNDIKEILKSQFSNKKFEIVLPKVLKNQLFSENGALFVIGSKGYKYNANQLVLSDLDMKLLNDLSNNKSIDEVTINQLFKNIVDSTNKYMPLYEIKNLNEVVEKFNNLEFNDKKKTITDFLLATHANPTMSNLKNIGLPSYFGRFTSGNAGIKLSENANVIYQSPTGLFSRKVKISDF

SEQ ID NO: 228 - protein, 1473 aa, Flavobacterium branchiophilum
MAKILGLDLGTNSIGWAVVERENIDFSLIDKGVRIFSEGVKSEKGIESSRAAERTGYRSARKIKYRRKLRKYETLKVLSLNRMCPLSIEEVEEWKKSGFKDYPLNPEFLKWLSTDEESNVNPYFFRDRASKHKVSLFELGRAFYHIAQRRGFLSNRLDQSAEGILEEHCPKIEAIVEDLISIDEISTNITDYFFETGILDSNEKNGYAKDLDEGDKKLVSLYKSLLAILKKNESDFENCKSEIIERLNKKDVLGKVKGKIKDISQAMLDGNYKTLGQYFYSLYSKEKIRNQYTSREEHYLSEFITICKVQGIDQINEEEKINEKKFDGLAKDLYKAIFFQRPLKSQKGLIGKCSFEKSKSRCAISHPDFEEYRMWTYLNTIKIGTQSDKKLRFLTQDEKLKLVPKFYRKNDFNFDVLAKELIEKGSSFGFYKSSKKNDFFYWFNYKPTDTVAACQVAASLKNAIGEDWKTKSFKYQTINSNKEQVSRTVDYKDLWHLLTVATSDVYLYEFAIDKLGLDEKNAKAFSKTKLKKDFASLSLSAINKILPYLKEGLLYSHAVFVANIENIVDENIWKDEKQRDYIKTQISEIIENYTLEKSRFEIINGLLKEYKSENEDGKRVYYSKEAEQSFENDLKKKLVLFYKSNEIENKEQQETIFNELLPIFIQQLKDYEFIKIQRLDQKVLIFLKGKNETGQIFCTEEKGTAEEKEKKIKNRLKKLYHPSDIEKFKKKIIKDEFGNEKIVLGSPLTPSIKNPMAMRALHQLRKVLNALILEGQIDEKTIIHIEMARELNDANKRKGIQDYQNDNKKFREDAIKEIKKLYFEDCKKEVEPTEDDILRYQLWMEQNRSEIYEEGKNISICDIIGSNPAYDIEHTIPRSRSQDNSQMNKTLCSQRFNREVKKQSMPIELNNHLEILPRIAHWKEEADNLTREIEIISRSIKAAATKEIKDKKIRRRHYLTLKRDYLQGKYDRFIWEEPKVGFKNSQIPDTGIITKYAQAYLKSYFKKVESVKGGMVAEFRKIWGIQESFIDENGMKHYKVKDRSKHTHHTIDAITIACMTKEKYDVLAHAWTLEDQQNKKEARSIIEASKPWKTFKEDLLKIEEEILVSHYTPDNVKKQAKKIVRVRGKKQFVAEVERDVNGKAVPKKAASGKTIYKLDGEGKKLPRLQQGDTIRGSLHQDSIYGAIKNPLNTDEIKYVIRKDLESIKGSDVESIVDEVVKEKIKEAIANKVLLLSSNAQQKNKLVGTVWMNEEKRIAINKVRIYANSVKNPLHIKEHSLLSKSKHVHKQKVYGQNDENYAMAIYELDGKRDFELINIFNLAKLIKQGQGFYPLHKKKEIKGKIVFVPIEKRNKRDVVLKRGQQVVFYDKEVENPKDISEIVDFKGRIYIIEGLSIQRIVRPSGKVDEYGVIMLRYFKEARKADDIKQDNFKPDGVFKLGENKPTRKMNHNQFTAFVEGIDFKVLPSGKFEKI

SEQ ID NO: 229 - protein, 933 aa, Mycoplasma iowae
SVRDYSDGPGSEKSPTPYGLWRLNKEGKVEKIGENLWDVLVGKCTIYGNDDSIKDEKTKLRGGKNSPIAEVFNFINDLTNIYLFSSSKLKLNSKTKLSILDEFNISLKTSKPIKSFSEKKLVKHIISTTEFKDINFDDVYGYRIDTSKKPLFTKLENTITIAKWLLDNNVYNELNIYDQEDLIKINNIFVILQKSMDINKRAQLVSDEYKIDLPICLELVKKIKGVMQTHSFSYKAMLEYIPVGIKYNDLETGEDTSINASTYFVDKINNLNTKLLFNGRPRKYIPKNIFEDGIISPTSKRAFIQTINVLNKIIKVYSKDYDIDNIAIELPRDKNTAEERKKISSNQKKAGEEIAEVLKFAGLNVEEYTSKLNSKTKLKLKLLKEQNYKDIYDGQEIDVIDVIKNSNKYHEEHIIPYSLCFIDSRRNKVLTKFENNKQKGNKTPFQWLSSIGKYAEFKDRVEKLFVEQKISKAKKELLLFEQDPRTEMLGFIEKNLSDTRYASKLVFDTFRDFFKVNNPNVKIKVINGALTNYARYNLFATYKDGLLERKGIMKQREFYEHHGIDATILAFLGSNHKINQLLKLSHKFKKQDDNKIYDENTGELIEFTKDFLSDEARKKAMELSKQIFEIPCKFSRPIYRKSNVSFSNETLISMKWIDDKYTKGVKINKLSLVNKDLDLNEYFADYETNEMKNLICYQEDKTLYNKLKNIYDKYNNFVENSNIKPVKNPFINYMISNFSSDDSKIQNFKHIIFYDHKGNKKFVKSLKVCGDEKNLSNIVLRKDQKDIMNSKKIKKSGILESLNPISARIYKDNKGKYITIPINSLVLNWTKKGLEIDNEKLCNILKSKNIFNNQFIEINAGQSIINNENKLFYFVGGGDFKVNKLEIKSQFCDNEIFFPRKQMNISIATIIDNYKLCEVDELGKIYNIRKIVL

SEQ ID NO: 230 - protein, 1358 aa, Acidaminococcus intestini; identical to SEQ ID NO: 94

SEQ ID NO: 231 - protein, 983 aa, Campylobacter jejuni
MARILAFDIGISSIGWAFSENDELKDCGVRIFTKAENPKTGESLALPRRLARSARKRLARRKARLNHLKHLIANEFKLNYEDYQSFDESLAKAYKGSLISPYELRFRALNELLSKQDFARVILHIAKRRGYDDIKNSDDKEKGAILKAIKQNEEKLANYQSVGEYLYKEYFQKFKENSKEFTNVRNKKESYERCIAQSFLKDELKLIFKKQREFGFSFSKKFEEEVLSVAFYKRALKDFSHLVGNCSFFTDEKRAPKNSPLAFMFVALTRIINLLNNLKNTEGILYTKDDLNALLNEVLKNGTLTYKQTKKLLGLSDDYEFKGEKGTYFIEFKKYKEFIKALGEHNLSQDDLNEIAKDITLIKDEIKLKKALAKYDLNQNQIDSLSKLEFKDHLNISFKALKLVTPLMLEGKKYDEACNELNLKVAINEDKKDFLPAFNETYYKDEVTNPVVLRAIKEYRKVLNALLKKYGKVHKINIELAREVGKNHSQRAKIEKEQNENYKAKKDAELECEKLGLKINSKNILKLRLFKEQKEFCAYSGEKIKISDLQDEKMLEIDHIYPYSRSFDDSYMNKVLVFTKQNQEKLNQTPFEAFGNDSAKWQKIEVLAKNLPTKKQKRILDKNYKDKEQKNFKDRNLNDTRYIARLVLNYTKDYLDFLPLSDDENTKLNDTQKGSKVHVEAKSGMLTSALRHTWGFSAKDRNNHLHHAIDAVIIAYANNSIVKAFSDFKKEQESNSAELYAKKISELDYKNKRKFFEPFSGFRQKVLDKIDEIFVSKPERKKPSGALHEETFRKEEFYQSYGGKEGVLKALELGKIRKVNGKIVKNGDMFRVDIFKHKKTNKFYAVPIYTMDFALKVLPNKAVARSKKGEIKDWILMDENYEFCFSLYKDSLILIQTKDMQEPEFVYYNAFTSSTVSLIVSKHDNKFETLSKNQKILFKNANEKEVIAKSIGIQNLKVFEKYIVSALGEVTKAEFRQREDFKK

SEQ ID NO: 232 - protein, 1338 aa, Streptococcus macacae
MTKPYSIGLDIGTNSVGWAVVTDGYKVPAKKMKVLGNTDKSHIKKNLLGALLFDSGNTAKDRRLKRTARRRYTRRRNRILYLQEIFAEEMAKADESFFQRLNESFLTNDDKEFDSHPIFGNKAEEEAHHHKFPTIFHLRKHLADSTEKSDLRLIYLALAHMIKFRGHFLIEGQLKAENTNVQTLFDDFVEVYDKTVEESHLSEISVSSILTEKISKSRRLENLIKYYPTEKKNTLFGNLIALSLGLQPNFKTNFKLSEDAKLQFSKDTYEEDLGELLGKIGDNYADLFISAKNLYDAILLSGILTIDDNTTKAPLSASMIKRYEEHQEDLAQLKKFIRQNLPDQYSEVFSDKTKDGYAGYIDGKTNQEAFYKYIKNMLSKTEGADYFLDKIDREDFLRKQRTFDNGSVPHQIHLQEMHAILRRQGEYYPFLKENQDKIEKILTFRIPYYVGPLARKGSRFAWAEYKADKKVTPWNFDDILDKEKSAEEFITRMTLNDLYLPEEKVLPKHSLVYETFNVYNELTKVKYVNEQGKAIFFDANMKQEIFDHVFKENRKVTKDKLLNYLNKEFEEFRIVNLTGLDKENKAFNSSLGTYHDLRKILDKSFLDDKVNEKIIEDIIQTLTLFEDREMIRQRLQKYSDIFTTQQLKKLERRHYTGWGRLSAKLINGIRDKQSNKTILGYLIDDGYSNRNFMQLINDDSLPFKEEIARAQVIGETDDLNQLVSDIAGSPAIKKGILQSLKIVDELVKVMGHNPANIVIEMARENQTTAKGRRSSQQRYKRLEEAIKNLDHDLNHKILKEHPTDNQALQNDRLFLYYLQNGRDMYTEDPLDINRLSDYDIDHIIPQSFIKDDSIDNKVLVSSAKNRGKSDNVPSEDVVNRMRPFWNKLLSCGLISQRKYSNLTKKELKPDDKAGFIKRQLVETRQITKHVAQILDARFNTKRDENKKVIRDVKIITLKSNLVSQFRKDFKFYKVREINDYHHAHDAYLNAVIGKALLDVYPQLEPEFVYGEYPHFHGYKENKATAKKFFYSNIMNFFKKDDIRTDENGEIVWKKDEHISNIKRVLSYPQVNIVKKVEIQTVGQNGGLFDDNPKSPLEVTPSKLVPLKKELNPKKYGGYQKPTTAYPVLLITDTKQLIPISVMNKKQFEQNPVKFLRDRGYQQVGKNDFIKLPKYTLVDIGDGIKRLWASSKEIHKGNQLVVSKKSQILLYHAHHLDSDLSNDYLQNHNQQFDVLFNEIISFSKKCKLGKEHIQKIENVYSNKKNSASIEELAESFIKLLGFTQLGATSPFNFLGVKLNQKQYKGKKDYILPCTEGTLIRQSITGLYETRVDLSKIGED

SEQ ID NO: 233 - protein, 1265 aa, Mycoplasma ovipneumoniae
MHNKKNITIGFDLGIASIGWAIIDSTTSKILDWGTRTFEERKTANERRAFRSTRRNIRRKAYRNQRFINLILKYKDLFELKNISDIQRANKKDTENYEKIISFFTEIYKKCAAKHSNILEVKVKALDSKIEKLDLIWILHDYLENRGFFYDLEEENVADKYEGIEHPSILLYDFFKKNGFFKSNSSIPKDLGGYSFSNLQWVNEIKKLFEVQEINPEFSEKFLNLFTSVRDYAKGPGSEHSASEYGIFQKDEKGKVFKKYDNIWDKTIGKCSFFVEENRSPVNYPSYEIFNLLNQLINLSTDLKTTNKKIWQLSSNDRNELLDELLKVKEKAKIISISLKKNEIKKIILKDFGFEKSDIDDQDTIEGRKIIKEEPTTKLEVTKHLLATIYSHSSDSNWININNILEFLPYLDAICIILDREKSRGQDEVLKKLTEKNIFEVLKIDREKQLDFVKSIFSNTKFNFKKIGNFSLKAIREFLPKMFEQNKNSEYLKWKDEEIRRKWEEQKSKLGKTDKKTKYLNPRIFQDEIISPGTKNTFEQAVLVLNQIIKKYSKENIIDAIIIESPREKNDKKTIEEIKKRNKKGKGKTLEKLFQILNLENKGYKLSDLETKPAKLLDRLRFYHQQDGIDLYTLDKINIDQLINGSQKYEIEHIIPYSMSYDNSQANKILTEKAENLKKGKLIASEYIKRNGDEFYNKYYEKAKELFINKYKKNKKLDSYVDLDEDSAKNRFRFLTLQDYDEFQVEFLARNLNDTRYSTKLFYHALVEHFENNEFFTYIDENSSKHKVKISTIKGHVTKYFRAKPVQKNNGPNENLNNNKPEKIEKNRENNEHHAVDAAIVAIIGNKNPQIANLLTLADNKTDKKFLLHDENYKENIETGELVKIPKFEVDKLAKVEDLKKIIQEKYEEAKKHTAIKFSRKTRTILNGGLSDETLYGFKYDEKEDKYFKIIKKKLVTSKNEELKKYFENPFGKKADGKSEYTVLMAQSHLSEFNKLKEIFEKYNGFSNKTGNAFVEYMNDLALKEPTLKAEIESAKSVEKLLYYNFKPSDQFTYHDNINNKSFKRFYKNIRIIEYKSIPIKFKILSKHDGGKSFKDTLFSLYSLVYKVYENGKESYKSIPVTSQMRNFGIDEFDFLDENLYNKEKLDIYKSDFAKPIPVNCKPVFVLKKGSILKKKSLDIDDFKETKETEEGNYYFISTISKRFNRDTAYGLKPLKLSVVKPVAEPSTNPIFKEYIPIHLDELGNEYPVKIKEHTDDEKLMCTIK

SEQ ID NO: 234 - protein, 1535 aa, Flavobacterium columnare
MTKILGLDLGTNSIGWAIRDTENEGINQILDKGARIFSEGVKSENGKEISRAAERTAYRSARKIKYRRKLRKYETLKVLSINGMCPLSVEEVEQWKKSGFKEYPLNPEFLDWLRTNEDKNINPYLFRDKASKQKVTLFELGRALYHIAQRRGFLSNRLDQSAEGVFEEHNPQIQNLIEDLDSSNTILNELKEYYINLGIIDETEKSGFKKDLDEGEKKLKSLYNSLVAITKKNANDIETCKQELIARLNKKEDLGKVKGKIKDISQAMLDRNFKTLGQYFFSLYNKERIRNQYTSREEHYLEEFIIICQTQGIEGINTNEKLPEKKFTGLAKDLYRAIFFQRPLKSQKGLIGKCSFEKNKSRCAVSHPDYEEFRMWSYLNTIKIGTQSEKTLRFLTLEEKLKLVPKFYRKSDFNFEVLAKELVEKGASFGYYKSSKKNEFFYWFNYKPTDSVSACVVSASLENAIGKDWKIKTFEYQTRNTEKNEVTKSVDYKDLWHLLSVATSDTYLYDFAIEKLKLEPKNAKAFSKTKLKKDFASLSLAAIAKILPYLKQGLLYSHAVFMANIENIVDADIWKDEEQQKFIQSKIVELVDNYIVEKSKLELINGLLKIYNTEDKEGRKVYYSKEAESLFEADLRKKLVPFYKANIIIEEHEQEIIFQDLFPILMDQLKKQEFIKIGRLDKQIEAFLEGENEEGQIFCNHTDKLKKLYHPSDIEVFKKKTIKDEWGNEKVVLGSPLTTSIKNPMAMRALHQLRKVLNTLIANDQIDEDTRIHIEMARELNDANKRKGIQDFQNENKKFREEAIKEIKKLYLEECHKDVNPTEDDILRYQLWLEQGKCEIYEEGNNISICDIIGSNPSYDIEHTIPRSISQDNSQMNKTLCSLKFNRSIKKQKMPVELSNYNDILPRIAHWKKEAEELTRQIETISRSIKSAATKVAKDKNIRKRHYLTLKRDYILGKYERFTWEEPKVGFKNSQIPDTGIITKYAQAYLKSYFKRVESVKGGAVAEFRKLWGIQESFIDENWWKHYKDKDRDKHTHHTIDAITIACMPKDKYDLLAHAWRLEDEQDKKAAKVLIEQAKPWKTFKEDIEKIETEILVSHFTPDNVKKQSKSIIKNRGKKVYVLKNELPVNFKNKIEGKDYFKLKFDSKILYKIPKKKEKQTDTFYEELPKNYLNGVEGKDYFKINTTGKTFYKIPIFNQGDTIRGSLHQETTYGAIKLPDIDIETKKPLHTDKGGFILKKDIKGNEIVFFVVRKEISKISENDVQNIVDNVVRKKIENAIANSLITFKIVKKKKVAVIKEGVTIWMREPNIEKGIEGIPIKKVRIITNSVKNPIEIKVHSPLSKSRHKHKQKVYGQNDENYAMALYELDGKREFELINNFNLAKLLKQSQSYYPLHKEKEIKGKKILVPIEKRNNKDVILKRGQQVVFYDKTVENPKDISEIIDFRERIYIIEGLTIQRQKDKKTSKVNEYGIIQLRHFKEARKSEEISKDNFKPDGEFKINENKPTRKMNHNQFTAFVEGIDFKVLPSGKFQKI

SEQ ID NO: 235 - protein, 1459 aa, Flavobacterium columnare
MKFNLGLDIGTNSIGWALVNEDYENKKGKIIAAGSRIIPMTQDILDKFGSGAITETQTALRTDYRSKRKLIQRFLLRRERLHRVLNVLDFLPKHYAESIDFEKYFGKFLPNTEPKLAYNQNQFIFQNSFLEMLKEFQEKHPELLTNNKKIPYDWTIYYLRKKALNQRIEKEELAWLLLQFNQKRGYNQLRDEEEESVPNKQVEFYSLKIIDVVADQPKEGRDKRWYSINLENGWTYRRESKTPLFNWEGKTKDFIVTTDLNQDGSIKKDKEGKEKRSFRAPSEGDWTLLKKKTEKEIYESGKTLGTYIYDALLNTPDLKIKGDFIRTIDRSIYKEELQQIINKQKEYHLELNSSKLYKACLEELYPKNEIYKSALKNKDIAYLFINDILYYQRPLKAPKYNIGKCTYESRTFKKEDKKIREYIPAVAKSHPLFQEFRLWQWIKNLKIYEKLSSDNCTDFFLTNEQDFENLFEFLWNKKEIDHKGILEYLVKTKFPDLKPKQVKTKVKEYRWNYVYDHEKDESKTYPCGETYFLLKNKLDKIYNAQDDFLDKERLYNLWHIIYSVTDKKQYEKALAKFALKNHLDTKSFVNTFKRIPPFKNDYAIYSLKAIKKLLPLMRVGKYWNYDDIDPITKQKIQCIITGEENDTISTLVREKTNHFSNENDFKNLPLWLAGYIVYNSHNESSEIEKWKSPQDIDTFLKKFKQHALRNPIVEQVVTETLRVVRDIWSKKGQGKKDFFNEIHIELGKDLKNPVDKRRKLSSTNTKNESTNTRIKALLIELFTQGVENVKPNSPKHQEILKIFEEGALNSGIEIEEDIIKISNTDQPTKKQLELYILWLEHKYKSPYTGQSIPLSKLFTPNYEIEHIIPRSKYYDDNLSNKVICETEINRLKNNQLGYEFINNHEIREVTLEEGKTIRLLSPEQYWNFVTTYYAKNKAKRENLLLKELPVQMVEKQLNDTRYVSKYVMQLLSKIVRKEDGTDNGINSTNILSISGKMTRALKNDWDLNDVWNDLLLYRFERLNTITKTNLFTTYSEQKQKRMPIVPDQYAKGFHKKRLDHRHHALDAIVIACITRNHINYMNNQNIQGEKLKKNAIEKENYREILQKSRLDIRAQLCEKKYNDNDPTKYNWVFIKPWADFTENTKDILESIIPSFKQNLRIINKTVNYYEKYNENGKKVKVRQIKGDNWAIRKPLHKETISGKVHLSYKTPAKGKILTATRKVLDSSMDFKSIEKITDTGIQKILKNYLEYKKSPELAFSPEGIEELNATITKYNNGFHHKPIYKVRIYEEGVKFPLGNKGNKKSKYVEAEKGTNLFFAIYKDQENNRYFETIPFNDVLETLKKGMSAVPEKNQEENTLVFALSPQDLVFVPTLDEIENPDIVDFKNLTKDQTNRIYKMVSSSGKQCFFIKAEVATSIVNKMEFSTSNKMENSIEGIQIKSNCWKLKLDRLGTITRVIK

SEQ ID NO: 236 - protein, 1389 aa, Oenococcus kitaharae
MARDYSVGLDIGTSSVGWAAIDNKYHLIRAKSKNLIGVRLFDSAVTAEKRRGYRTTRRRLSRRHWRLRLLNDIFAGPLTDFGDENFLARLKYSWVHPQDQSNQAHFAAGLLFDSKEQDKDFYRKYPTIYHLRLALMNDDQKHDLREVYLAIHHLVKYRGHFLIEGDVKADSAFDVHTFADAIQRYAESNNSDENLLGKIDEKKLSAALTDKHGSKSQRAETAETAFDILDLQSKKQIQAILKSVVGNQANLMAIFGLDSSAISKDEQKNYKFSFDDADIDEKIADSEALLSDTEFEFLCDLKAAFDGLTLKMLLGDDKTVSAAMVRRFNEHQKDWEYIKSHIRNAKNAGNGLYEKSKKFDGINAAYLALQSDNEDDRKKAKKIFQDEISSADIPDDVKADFLKKIDDDQFLPIQRTKNNGTIPHQLHRNELEQIIEKQGIYYPFLKDTYQENSHELNKITALINFRVPYYVGPLVEEEQKIADDGKNIPDPTNHWMVRKSNDTITPWNLSQVVDLDKSGRRFIERLTGTDTYLIGEPTLPKNSLLYQKFDVLQELNNIRVSGRRLDIRAKQDAFEHLFKVQKTVSATNLKDFLVQAGYISEDTQIEGLADVNGKNFNNALTTYNYLVSVLGREFVENPSNEELLEEITELQTVFEDKKVLRRQLDQLDGLSDHNREKLSRKHYTGWGRISKKLLTTKIVQNADKIDNQTFDVPRMNQSIIDTLYNTKMNLMEIINNAEDDFGVRAWIDKQNTTDGDEQDVYSLIDELAGPKEIKRGIVQSFRILDDITKAVGYAPKRVYLEFARKTQESHLTNSRKNQLSTLLKNAGLSELVTQVSQYDAAALQNDRLYLYFLQQGKDMYSGEKLNLDNLSNYDIDHIIPQAYTKDNSLDNRVLVSNITNRRKSDSSNYLPALIDKMRPFWSVLSKQGLLSKHKFANLTRTRDFDDMEKERFIARSLVETRQIIKNVASLIDSHFGGETKAVAIRSSLTADMRRYVDIPKNRDINDYHHAFDALLFSTVGQYTENSGLMKKGQLSDSAGNQYNRYIKEWIHAARLNAQSQRVNPFGFVVGSMRNAAPGKLNPETGEITPEENADWSIADLDYLHKVMNFRKITVTRRLKDQKGQLYDESRYPSVLHDAKSKASINFDKHKPVDLYGGFSSAKPAYAALIKFKNKFRLVNVLRQWTYSDKNSEDYILEQIRGKYPKAEMVLSHIPYGQLVKKDGALVTISSATELHNFEQLWLPLADYKLINTLLKTKEDNLVDILHNRLDLPEMTIESAFYKAFDSILSFAFNRYALHQNALVKLQAHRDDFNALNYEDKQQTLERILDALHASPASSDLKKINLSSGFGRLFSPSHFTLADTDEFIFQSVTGLFSTQKTVAQLYQETK

SEQ ID NO: 237 - protein, 1425 aa, Prevotella micans
MIQKIFGLDLGTNSIGSSVRNLELGENLTEQLEFFSSDIFGSSVSKNSNGREYSLAGNRSAHRRSRGLNEARRRKLWATLDLLIEHGLCPMSPDSLMQWRTYDKQKGLYRQYPIEDKDFNAWIMLDFNGDGKPDYSSPYQLRRELVVRQFDFDQPIERYKLGRALYHIAQHRGFKSSKGETIADQEKNEKKPIAEEGADIANEMKASETKLSKGLVAYMQENHLKTVGEAFAKLEDERVRIRNNESYRAIRSQYQDEIKEIFTYQKKLSVESELYERLTSEKKGVGTIFYKRPLRSQRGNVGKCTLERNKPRCPIGRPEFEEFRAWTLINNIKIRETAGEPYKQLPIKLRQELLKDCFLSKVKADFKFEDIRKYIEKRLGLSFSNDDKTINYKDSVSIAACPVTVRMKKLLGENWANCRIDGEKRRQAHGKNNNNEHIVSYTEEDIWHVCYNAEDPEEVSNFARKALHWDENKIKELVRLWTSIPQGYAMLSLKAIRNINRMLLLGLKYSDAVLLAKLPDIVPVSDEDILAITKEFLQLEDKLNQEKQINNIVNSLIANYKSKLEENRFADHNYQYQLGEGDDEDINTQIKSHIGAKLWVQIGADEQTKIFQAVRSKYQDFFKSYKRKFVESPKLGELLVAFLTEKFPNVKSKQWERLYHPSQIAIYRPIPVDNDRSKLRLGNPNIGAIKNPTVMRVLNTLRRRVNQLLDDGVISPDETRVVVETARELNDANTKWALDRYNRIRRDENEKIRKILKELNPTTNSISEQDIDKARYIFEQCETDFYTDGKVPYYNKDIKKYKLWLEQGGQCLYTGQTINLTNLFNPNAFDMEHTIPKSISFDNSDQNLTLCESYYNRFIKKNNIPTDMPNYDKDVTINGKEYTAIKPRLQRWKERVDRLSRNVDFWKGQARRAQDKDRKDECIREKHLWDMELAYWKGKLERFTMTDVTDGFKNSQLVDTRVITRHAVLYLKSIFNHVEVQRGETTAEFRKILGLQSIDEKKDRSLHSHHAIDATMLTVIPSAAKRDRMLELFYKIEETKKALKNYNDNNKTGLNLELKGLEEKLDKEKKDCRVGRRVNDLDRFINENIIVSHHTKDQALTPAHRRLRKRGKIVGGKEHPRWQTGDSLRGEIHKASYYGAITQFAKDANGKVLMKDGQAQIDPTIYYVIRRELKYKRSTQDSGFTNWEDLEKVIVDTDLFGLMKGQFPEGTSFKDACEQGFYMIKKGKNGEGDVKTHRIRHVRCKAVKTALRIKEQTYKSSKDYKQFFYAAVGDLYVMCYYTDGKKRDFKIYSLYDISNHRKSGTEDIPKFITDKKGNHLPLDYKLRTGDMVLLYKDNPEELKDLDQVNLKRRLYKVNRFESEGLIILLTHHLSTTTERGCSIGKIENYQNLPTAIRCGIKTIKFLIMGKHRDFVIRNGNIEFKH

SEQ ID NO: 238 - protein, 1473 aa, Mucilaginibacter paludis
MKNILGLDLGTNSIGWALIEKDTDQKNGNILGTGSRIIPMSQDIKDEFGKGNSISQTADRTKFRSVRRLRERHLLRRERLHRVLNVLGFLPKHYADQIDFKKRLGKLVNETEPKLVYDNKNFIFKKSFEAMLSDFNQHQPLLLADGKKVPFDWTIYYLRKKALTEKIEKEELAWLILNFNQKRGYYQLRGEEEEENPNKMVAFHSLKIVEVIADESQKGKAETWYSLILENGWIYRRSSKTPLYDWKGKQRDFIVTTDLNDDGSIKTDKEGLEKRSFRAPVEDDWTLVKKKTEQEINRSHKTVGTYIYENLLQDPKQKIKGKLVRTIEREFYKDELKMILKNQQKFHPELNDEHLYINCVRELYRNNQAHQTILSKKDFVHLFIDDIIFYQRPLRSQKSSISNCTLEFRKYKNENGTDQTDYLKAIPKSHPLFQEFRLWQWIYNLGIYQKEDDTNVTDELIKNIDGYQDLFDFLNNKKEIRQDILIKFLVEQTGLKGKPLSSVVAKYRWNFVEDKIYPCNETGTQIRTRLAKVENTPEDFLTAETEIKLWHIIYSVNDKADYEKALKTFAEKHNLDTHSFVENFKKFPPFKSEYGSFSEKAIKKLLPLIRLGKYWSWENIDKKTQERIEKILTGEFDEAIKSRVRDKAIHLTEEDHFQGLQLWLASYVVYGRHSEADNLDKWHTVADLEDYLAEFRQHSLRNPIVEQVITETLRVVKDIWLQYGQGAKDFFSEIHIELAREMKNTGDERKRLTSLVTDNENTNLRIKVLLSELLNDGNVENVRPYSPMQQEALKIFEDGVLNSDIEIEDDILKISKMAQPTNTELKRYKLWLEQKYRSPYTGQIIPLNRLFTADYEIEHIIPQSRFFDDSFSNKIICESAVNQLKDKQLGLEFIKNHSGTIVKLGMGKTAKILDVESYNEFVKGNYTKNISKRNKLMLEEIPDKMIERQLNDTRYISKFIISALSNIVRSESNDDGFNSKNVLPGNGKITSRLKQDWGMNDIWNELILPRFERMNKITDSAVFTAWNENNQKFLPIVPLEFSKGFQKKRIDHRHHALDALVIAASTREHINLLNNEHAKSDKRFDLNRKLRKFEKVAYNDPKTGKRIEKEVPTIFLKPWETFTVDAKNSLESIIVSFKQNLRVINRATNYSESYNDENGALRLGKDGNPLKEKIKQSKGDSWAIRKPMHKDFVYGKVHLQNVKLPKDKFITAIRKSLDVTFDLKRIETITDTGIQKILKNYLHSKENKVELAFSPEGIEDMNQHIERYNDGKKHQPIHKVRVFEIGSRFSLGESGNKKTKFVEAAKGTNLFFAVYQDDNKGKRNYETIPLNIVIERQKLGLHSVPTEDAKGGKLLFHLSPNDMVYVPTSEELEDNLASVNIKRLNTAQRKRIYKVEKASGVECYFIRQDIAYLIKNYDAKTKIGELESQNKLQTTMTDDRLKITDVCVKLNIDRLGSIAETFLGNQYGASKKT

SEQ ID NO: 239 - protein, 1365 aa, Filifactor alocis
MTKEYYLGLDVGTNSVGWAVTDSQYNLCKFKKKDMWGIRLFESANTAKDRRLQRGNRRRLERKKQRIDLLQEIFSPEICKIDPTFFIRLNESRLHLEDKSNDFKYPLFIEKDYSDIEYYKEFPTIFHLRKHLIESEEKQDIRLIYLALHNIIKTRGHFLIDGDLQSAKQLRPILDTFLLSLQEEQNLSVSLSENQKDEYEEILKNRSIAKSEKVKKLKNLFEISDELEKEEKKAQSAVIENFCKFIVGNKGDVCKFLRVSKEELEIDSFSFSEGKYEDDIVKNLEEKVPEKVYLFEQMKAMYDWNILVDILETEEYISFAKVKQYEKHKTNLRLLRDIILKYCTKDEYNRMFNDEKEAGSYTAYVGKLKKNNKKYWIEKKRNPEEFYKSLGKLLDKIEPLKEDLEVLTMMIEECKNHTLLPIQKNKDNGVIPHQVHEVELKKILENAKKYYSFLTETDKDGYSVVQKIESIFRFRIPYYVGPLSTRHQEKGSNVWMVRKPGREDRIYPWNMEEIIDFEKSNENFITRMTNKCTYLIGEDVLPKHSLLYSKYMVLNELNNVKVRGKKLPTSLKQKVFEDLFENKSKVTGKNLLEYLQIQDKDIQIDDLSGFDKDFKTSLKSYLDFKKQIFGEEIEKESIQNMIEDIIKWITIYGNDKEMLKRVIRANYSNQLTEEQMKKITGFQYSGWGNFSKMFLKGISGSDVSTGETFDIITAMWETDNNLMQILSKKFTFMDNVEDFNSGKVGKIDKITYDSTVKEMFLSPENKRAVWQTIQVAEEIKKVMGCEPKKIFIEMARGGEKVKKRTKSRKAQLLELYAACEEDCRELIKEIEDRDERDFNSMKLFLYYTQFGKCMYSGDDIDINELIRGNSKWDRDHIYPQSKIKDDSIDNLVLVNKTYNAKKSNELLSEDIQKKMHSFWLSLLNKKLITKSKYDRLTRKGDFTDEELSGFIARQLVETRQSTKAIADIFKQIYSSEVVYVKSSLVSDFRKKPLNYLKSRRVNDYHHAKDAYLNIVVGNVYNKKFTSNPIQWMKKNRDTNYSLNKVFEHDVVINGEVIWEKCTYHEDTNTYDGGTLDRIRKIVERDNILYTEYAYCEKGELFNATIQNKNGNSTVSLKKGLDVKKYGGYFSANTSYFSLIEFEDKKGDRARHIIGVPIYIANMLEHSPSAFLEYCEQKGYQNVRILVEKIKKNSLLIINGYPLRIRGENEVDTSFKRAIQLKLDQKNYELVRNIEKFLEKYVEKKGNYPIDENRDHITHEKMNQLYEVLLSKMKKFNKKGMADPSDRIEKSKPKFIKLEDLIDKINVINKMLNLLRCDNDTKADLSLIELPKNAGSFVVKKNTIGKSKIILVNQSVTGLYENRREL

SEQ ID NO: 240 - protein, 1130 aa, Streptococcus macedonicus
MTNGKILGLDIGIASVGVGIIEAKTGKVVHANSRLFSAANAENNAERRGFRGSRRLNRRKKHRVKRVRDLFEKYGIVTDFRNLNLNPYELRVKGLTEQLTNEELFAALRTISKRRGISYLDDAEDDSTGSTDYAKSIDENRRLLKTKTPGQIQLERLEKYGQLRGNFTVYDENGEAHRLINVFSTSDYEKEARKILETQADYNKKITAEFIDDYVEILTQKRKYYHGPGNEKSRTDYGRFRTDGTTLENIFGILIGKCNFYPDEYRASKASYTAQEYNFLNDLNNLKVPTETGKLSTEQKESLVEFAKNTAILGPAKLLKEIAKILDCKVDEIKGYREDDKGKPDLHTFEPYRKLKFNLDSVNIDYLSREVLDKLADILTLNTEREGIEDAIKRNLPNQFTEEQISEIINVRKSQSTAFNKGWHSFSAKLMNELIPELYATSDEQMTILTRLEKFKVKKKSSKNIKTIDEKEITDEIYNPVVAKSVRQTIKIINAAVKKYGDFDKIVIEMPRDKNADDEKKFINKRNKENKKEKDDALKRAAYLYNGTDKLPDEVFHGNKQLETKIRLWYQQGERCLYSGKPIPIQELVHNSNNFEIDHILPLSLSFDDSLANKVLVYSWTNQEKGQKTPYQVIDSMDAAWSFREMKEYVLKQKGLGKKKRDYLLTTENIDKIEVKKKFIERNLVDTRYASRVVLNSLQSALRELGKDTKVSVVRGQFTSQLRRKWKIDKSRETYHHHAVDALIIAASSQLKLWEKQDNPMFVDYGNNQVVDKQTGEILSVSDNEYKELVFQPPYQGFVNTISSKGFEDEILFSYQVDSKYNRKVSDATIYSTRKAKIGKDKKEETYVLGKIKDIYSQNGFDTFVKKYNKDKTQFLMYQKDPLTWENVIEVILGDYPTTKKSEDGKNDVKCNPFEEYRRENGLICKYSKKGKGTPIKSLKYYDKKLGNCIDITPEESRNKVILQSINPWRADVYFNPETLKYELMGLKYSDLSFEKGTGNYHISQEKYDAIKEKEGIGKKSEFKFTLYRNDLILIKDIASGEQEIYRFLSRTMPNVNHYVELKPYDKEKFDNVQELVEALGEADKVGRCIKSLNKPNISIYKVRTDVLGNKYFVKKEGDKPKLDFKNNKK

SEQ ID NO: 241 - protein, 1367 aa, Streptococcus pyogenes
MDKKYSIGLDIGTNSVGWAVITDDYKVPSKKFKVLGNTDRHSIKKNLIGALLFGSGETAEATRLKRTARRRYTRRKNRICYLQEIFSNEMAKVDDSFFHRLEESFLVEEDKKHERHPIFGNIVDEVAYHEKYPTIYHLRKKLADSTDKADLRLIYLALAHMIKFRGHFLIEGDLNPDNSDVDKLFIQLVQIYNQLFEENPINASRVDAKAILSARLSKSRRLENLIAQLPGEKRNGLFGNLIALSLGLTPNFKSNFDLAEDAKLQLSKDTYDDDLDNLLAQIGDQYADLFLAAKNLSDAILLSDILRVNSEITKAPLSASMIKRYDEHHQDLTLLKALVRQQLPEKYKEIFFDQSKNGYAGYIDGGASQEEFYKFIKPILEKMDGTEELLVKLNREDLLRKQRTFDNGSIPHQIHLGELHAILRRQEDFYPFLKDNREKIEKILTFRIPYYVGPLARGNSRFAWMTRKSEETITPWNFEEVVDKGASAQSFIERMTNFDKNLPNEKVLPKHSLLYEYFTVYNELTKVKYVTEGMRKPAFLSGEQKKAIVDLLFKTNRKVTVKQLKEDYFKKIECFDSVEISGVEDRFNASLGAYHDLLKIIKDKDFLDNEENEDILEDIVLTLTLFEDRGMIEERLKTYAHLFDDKVMKQLKRRRYTGWGRLSRKLINGIRDKQSGKTILDFLKSDGFANRNFMQLIHDDSLTFKEDIQKAQVSGQGHSLHEQIANLAGSPAIKKGILQTVKIVDELVKVMGHKPENIVIEMARENQTTQKGQKNSRERMKRIEEGIKELGSQILKEHPVENTQLQNEKLYLYYLQNGRDMYVDQELDINRLSDYDVDHIVPQSFIKDDSIDNKVLTRSDKNRGKSDNVPSEEVVKKMKNYWRQLLNAKLITQRKFDNLTKAERGGLSELDKAGFIKRQLVETRQITKHVAQILDSRMNTKYDENDKLIREVKVITLKSKLVSDFRKDFQFYKVREINNYHHAHDAYLNAVVGTALIKKYPKLESEFVYGDYKVYDVRKMIAKSEQEIGKATAKYFFYSNIMNFFKTEITLANGEIRKRPLIETNGETGEIVWDKGRDFATVRKVLSMPQVNIVKKTEVQTGGFSKESILPKRNSDKLIARKKDWDPKKYGGFDSPTVAYSVLVVAKVEKGKSKKLKSVKELLGITIMERSSFEKNPIDFLEAKGYKEVKKDLIIKLPKYSLFELENGRKRMLASAGELQKGNELALPSKYVNFLYLASHYEKLKGSPEDNEQKQLFVEQHKHYLDEIIEQISEFSKRVILADANLDKVLSAYNKHRDKPIREQAENIIHLFTLTNLGAPAAFKYFDTTIDRKRYTSTKEVLDATLIHQSITGLYETRIDLSQLGGD

SEQ ID NO: 242 - protein, 1233 aa, Mycoplasma canis
MEKKRKVTLGFDLGIASVGWAIVDSETNQVYKLGSRLFDAPDTNLERRTQRGTRRLLRRRKYRNQKFYNLVKRTEVFGLSSREAIENRFRELSIKYPNIIELKTKALSQEVCPDEIAWILHDYLKNRGYFYDEKETKEDFDQQTVESMPSYKLNEFYKKYGYFKGALSQPTESEMKDNKDLKEAFFFDFSNKEWLKEINYFFNVQKNILSETFIEEFKKIFSFTRDISKGPGSDNMPSPYGIFGEFGDNGQGGRYEHIWDKNIGKCSIFTNEQRAPKYLPSALIFNFLNELANIRLYSTDKKNIQPLWKLSSVDKLNILLNLFNLPISEKKKKLTSTNINDIVKKESIKSIMISVEDIDMIKDEWAGKEPNVYGVGLSGLNIEESAKENKFKFQDLKILNVLINLLDNVGIKFEFKDRNDIIKNLELLDNLYLFLIYQKESNNKDSSIDLFIAKNESLNIENLKLKLKEFLLGAGNEFENHNSKTHSLSKKAIDEILPKLLDNNEGWNLEAIKNYDEEIKSQIEDNSSLMAKQDKKYLNDNFLKDAILPPNVKVTFQQAILIFNKIIQKFSKDFEIDKVVIELAREMTQDQENDALKGIAKAQKSKKSLVEERLEANNIDKSVFNDKYEKLIYKIFLWISQDFKDPYTGAQISVNEIVNNKVEIDHIIPYSLCFDDSSANKVLVHKQSNQEKSNSLPYEYIKQGHSGWNWDEFTKYVKRVFVNNVDSILSKKERLKKSENLLTASYDGYDKLGFLARNLNDTRYATILFRDQLNNYAEHHLIDNKKMFKVIAMNGAVTSFIRKNMSYDNKLRLKDRSDFSHHAYDAAIIALFSNKTKTLYNLIDPSLNGIISKRSEGYWVIEDRYTGEIKELKKEDWTSIKNNVQARKIAKEIEEYLIDLDDEVFFSRKTKRKTNRQLYNETIYGIATKTDEDGITNYYKKEKFSILDDKDIYLRLLREREKFVINQSNPEVIDQIIEIIESYGKENNIPSRDEAINIKYTKNKINYNLYLKQYMRSLTKSLDQFSEEFINQMIANKTFVLYNPTKNTTRKIKFLRLVNDVKINDIRKNQVINKFNGKNNEPKAFYENINSLGAIVFKNSANNFKTLSINTQIAIFGDKNWDIEDFKTYNMEKIEKYKEIYGIDKTYNFHSFIFPGTILLDKQNKEFYYISSIQTVRDIIEIKFLNKIEFKDENKNQDTSKTPKRLMFGIKSIMNNYEQVDISPFGINKKIFE

SEQ ID NO: 243 - protein, 1375 aa, Lactobacillus johnsonii
MTKIKDDYIVGLDIGTDSCGWVAMNSNNDILKLQGKTAIGSRLFEGGKSAAERRLFRTTHRRIKRRRWRLKLLEEFFDPYMAEVDPYFFARLKESGLSPLDKRKTVSSIVFPTSAEDKKFYDDYPTIYHLRYKLMTEDEKFDLREVYLAIHHIIKYRGNFLYNTSVKDFKASKIDVKSSIEKLNELYENLGLDLNVEFNISNTAEIEKVLKDKQIFKRDKVKKIAELFAIKTDNKEQSKRIKDISKQVANAVLGYKTRFDTIALKEISKDELSDWNFKLSDIDADSKFEALMGNLDENEQAILLTIKELFNEVTLNGIVEDGNTLSESMINKYNDHRDDLKLLKEVIENHIDRKKAKELALAYDLYVNNRHGQLLQAKKKLGKIKPRSKEDFYKVVNKNLDDSRASKEIKKKIELDSFMPKQRTNANGVIPYQLQQLELDKIIENQSKYYPFLKEINPVSSHLKEAPYKLDELIRFRVPYYVGPLISPNESTKDIQTKKNQNFAWMIRKEEGRITPWNFDQKVDRIESANKFIKRMTTKDTYLFGEDVLPANSLLYQKFTVLNELNNIRINGKRISVDLKQEIYENLFKKHTTVTVKKLENYLKENHNLVKVEIKGLADEKKFNSGLTTYNRFKNLNIFDNQIDDLKYRNDFEKIIEWSTIFEDKSIYKEKLRSIDWLNEKQINALSNIRLQGWGRLSKKLLAQLHDHNGQTIIEQLWDSQNNFMQIVTQADFKDAIAKANQNLLVATSVEDILNNAYTSPANKKAIRQVIKVVDDIVKAASGKVPKQIAIEFTRDADENPKRSQTRGSKLQKVYKDLSTELASKTIAEELNEAIKDKKLVQDKYYLYFMQLGRDAYTGEPINIDEIQKYDIDHILPQSFIKDDALDNRVLVSRAVNNGKSDNVPVKLFGNEMAANLGMTIRKMWEEWKNIGLISKTKYNNLLTDPDHINKYKSAGFIRRQLVETSQIIKLVSTILQSRYPNTEIITVKAKYNHYLREKFDLYKSREVNDYHHAIDAYLSAICGNLLYQNYPNLRPFFVYGQYKKFSSDPDKEKAIFNKTRKFSFISQLLKNKSENSKEIAKKLKRAYQFKYMLVSRETETRDQEMFKMTVYPRFSHDTVKAPRNLIPKKMGMSPDIYGGYTNNSDAYMVIVRIDKKKGTEYKILGIPTRELVNLKKAEKEDHYKSYLKEILTPRILYNKNGKRDKKITSFEIVKSKIPYKQVIQDGDKKFMLGSSTYVYNAKQLTLSTESMKAITNNFDKDSDENDALIKAYDEILDKVDKYLPLFDINKFREKLHSGREKFIKLSLEDKKDTILKVLEGLHDNAVMTKIPTIGLSTPLGFMQFPNGVILSENAKLIYQSPTGLFKKSVKISDL

SEQ ID NO: 244 - protein, 1053 aa, Staphylococcus aureus
MKRNYILGLDIGITSVGYGIIDYETRDVIDAGVRLFKEANVENNEGRRSKRGARRLKRRRRHRIQRVKKLLFDYNLLTDHSELSGINPYEARVKGLSQKLSEEEFSAALLHLAKRRGVHNVNEVEEDTGNELSTKEQISRNSKALEEKYVAELQLERLKKDGEVRGSINRFKTSDYVKEAKQLLKVQKAYHQLDQSFIDTYIDLLETRRTYYEGPGEGSPFGWKDIKEWYEMLMGHCTYFPEELRSVKYAYNADLYNALNDLNNLVITRDENEKLEYYEKFQIIENVFKQKKKPTLKQIAKEILVNEEDIKGYRVTSTGKPEFTNLKVYHDIKDITARKEIIENAELLDQIAKILTIYQSSEDIQEELTNLNSELTQEEIEQISNLKGYTGTHNLSLKAINLILDELWHTNDNQIAIFNRLKLVPKKVDLSQQKEIPTTLVDDFILSPVVKRSFIQSIKVINAIIKKYGLPNDIIIELAREKNSKDAQKMINEMQKRNRQTNERIEEIIRTTGKENAKYLIEKIKLHDMQEGKCLYSLEAIPLEDLLNNPFNYEVDHIIPRSVSFDNSFNNKVLVKQEENSKKGNRTPFQYLSSSDSKISYETFKKHILNLAKGKGRISKTKKEYLLEERDINRFSVQKDFINRNLVDTRYATRGLMNLLRSYFRVNNLDVKVKSINGGFTSFLRRKWKFKKERNKGYKHHAEDALIIANADFIFKEWKKLDKAKKVMENQMFEEKQAESMPEIETEQEYKEIFITPHQIKHIKDFKDYKYSHRVDKKPNRELINDTLYSTRKDDKGNTLIVNNLNGLYDKDNDKLKKLINKSPEKLLMYHHDPQTYQKLKLIMEQYGDEKNPLYKYYEETGNYLTKYSKKDNGPVIKKIKYYGNKLNAHLDITDDYPNSRNKVVKLSLKPYRFDVYLDNGVYKFVTVKNLDVIKKENYYEVNSKCYEEAKKLKKISNQAEFIASFYNNDLIKINGELYRVIGVNNDLLNRIEVNMIDITYREYLENMNDKRPPRIIKTIASKTQSIKKYSTDILGNLYEVKSKKHPQIIKKG

SEQ ID NO: 245 - protein, 1063 aa, Simonsiella muelleri
MEKFHYVLGLDLGIASVGWAAIEIDKETETSIGLLDCGVRTFERAEVPKTGDSLAKARREARSTRRLIRRRSHRLLRLKRLLKREIFRQPETFKDLPINAWQLRVKGLDSRLNEYEWAAVLLHLVKHRGYLSQRKSEMSETDSKSEMGRLLAGVAENHQLLQQEQYRTPAELALKKFVKHFRNKGGDYAHTFNRLDLQAELHLLFQKQRELGNPFTSPELERQVDDLLMTQRSALQGDAILKMLGHCGFEPEQFKAAKNTFSAERFIWLTKLNNLRIQDQGKERALTADERTKLLDEPYKKSKLTYAQVRKLLSLPQTAIFKGLRYDLEHDKKAENSTLMEMKSYHNIRQTLEKSGLKTEWQSIATQPEILDAIGTAFSIYKTDEDISHELKTCRLPENVLNELLKNINFDGFIQLSLTALRKILPLMEQGYRYDEACTQIYGNHHSGSLQQESKQFLPHIPIDDVRNPVVFRTLTQARKVVNAIIRRYGSPARVHIEMARELGKSKSDRDRIEKQQQKNKKERENAVAKFKEDFPDFVGEPRGKDILKMRLYEQQHGKCLYSGHDIDINRLNEKGYVEIDHALPFSRTWDDSQNNKVLVLGSENQNKRNQTPDEYLDGANNSQRWLEFQARVQTCHFSYGKKQRIQLAKLDDETEKGFLERNLNDTRYIARFMCQFVQENLYLTGKGKRLVFASNGGMTATLRNLWGLRKVREDNDRHHALDAIVVACSTASMQQKITKAFQRHESIEYVDTETGEVKFRIPQPWDFFRQEVMIRVFSDQPCEDLVEKLSARPEALHDNVTPLFVSRAPNRKMSGQGHLETIKSAKRLSEENSMVKKPLTTLKLKDIPEIVGYPSREPQLYAALKTRLETHDDDPIKAFAKPFYKPNKNGELGALVRSVRVKGVQNTGVMVHDGKGIADNATMVRVDVYTKAGKNYLVPVYVWQVAQGILPNRAVTSGKSEADWDLIDESFEFKFSLSRGDLVEMISNKGRIFGYYNGLDRANGSIGIREHDLEKSKGKDGVHRVGVKTATAFNKYHVDPLGKEIHRCSSEPRPTLKIKSKK

SEQ ID NO: 246 - protein, 1509 aa, Psychroflexus torquis
MKRILGLDLGTNSIGWSLIEHDFKNKQGQIEGLGVRIIPMSQEILGKFDAGQSISQTADRTKYRGVRRLYQRDNLRRERLHRVLKILDFLPKHYSESIDFQDKVGQFKPKQEVKLNYRKNEKNKHEFVFMNSFIEMVSEFKNAQPELFYNKGNGEETKIPYDWTLYYLRKKALTQQITKEELAWLILNFNQKRGYYQLRGEDIDEDKNKKYMQLKVNNLIDSGAKVKGKVLYNVIFDNGWKYEKQIVNKDEWEGRTKEFIITTKTLKNGNIKRTYKAVDSEIDWAAIKAKTEQDINKANKTVGEYIYESLLDNPSQKIRGKLVKTIERKFYKEEFEKLLSKQIELQPELFNESLYKACIKELYPRNENHQSNNKKQGFEYLFTEDIIFYQRPLKSQKSNISGCQFEHKIYKQKNKKTGKLELIKEPIKTISRSHPLFQEFRIWQWLQNLKIYNKEKIENGKLEDVTTQLLPNNEAYVTLFDFLNTKKELEQKQFIEYFVKKKLIDKKEKEHFRWNFVEDKKYPFSETRAQFLSRLAKVKGIKNTEDFLNKNTQVGSKENSPFIKRIEQLWHIIYSVSDLKEYEKALEKFAEKHNLEKDSFLKNFKKFPPFVSDYASYSKKAISKLLPIMRMGKYWSESAVPTQVKERSLSIMERVKVLPLKEGYSDKDLADLLSRVSDDDIPKQLIKSFISFKDKNPLKGLNTYQANYLVYGRHSETGDIQHWKTPEDIDRYLNNFKQHSLRNPIVEQVVMETLRVVRDIWEHYGNNEKDFFKEIHVELGREMKSPAGKREKLSQRNTENENTNHRIREVLKELMNDASVEGGVRDYSPSQQEILKLYEEGIYQNPNTNYLKVDEDEILKIRKKNNPTQKEIQRYKLWLEQGYISPYTGKIIPLTKLFTHEYQIEHIIPQSRYYDNSLGNKIICESEVNEDKDNKTAYEYLKVEKGSIVFGHKLLNLDEYEAHVNKYFKKNKTKLKNLLSEDIPEGFINRQLNDSRYISKLVKGLLSNIVRENGEQEATSKNLIPVTGVVTSKLKQDWGLNDKWNEIIAPRFKRLNKLTNSNDFGFWDNDINAFRIQVPDSLIKGFSKKRIDHRHHALDALVVACTSRNHTHYLSALNAENKNYSLRDKLVIKNENGDYTKTFQIPWQGFTIEAKNNLEKTVVSFKKNLRVINKTNNKFWSYKDENGNLNLGKDGKPKKKLRKQTKGYNWAIRKPLHKETVSGIYNINAPKNKIATSVRTLLTEIKNEKHLAKITDLRIRETILPNHLKHYLNNKGEANFSEAFSQGGIEDLNKKITTLNEGKKHQPIYRVKIFEVGSKFSISEDENSAKSKKYVEAAKGTNLFFAIYLDEENKKRNYETIPLNEVITHQKQVAGFPKSERLSVQPDSQKGTFLFTLSPNDLVYVPNNEELENRDLFNLGNLNVEQISRIYKFTDSSDKTCNFIPFQVSKLIFNLKKKEQKKLDVDFIIQNEFGLGSPQSKNQKSIDDVMIKEKCIKLKIDRLGNISKA

SEQ ID NO: 247 - protein, 1112 aa, Staphylococcus simulans
MLVGLKFKQSILFENMENAEDIKESATGSDAISLSDDYYENLSEFLTDEQLNFIESANTFFMGIMLDRILKGATSISAAKVRDYKIFKSQLKLIKDIVYQNKYDKYHEFFVTSKEDMRAYQENPDAKNFGKLSKFDQYLIHSKDQYAKLMKDLKGLVPKEYTEVLNLIDEQKFLVVQNTTDNASIPYQNNVFEAENILRNQQKYYPEITEEMIGKVINLISFRIPYYVGPLTNKNGQSDFAWMIRKSDEQTLPWNFDKVIDKSKSAEKFIRRMTSKCTYLLEEDVLPKHSLLYQEMEVLNELNNVQLRGENEPKHRIHRLDPKVKQFIYHNLFQKKKNVTHKDLITLLQNSEHRNTLNKTSGQKLKVFGTQNDSKFASKLSTYNDMKAILGSVENKRQMIEELVLWITIFEDKAILKQKIGEKYPNITEKQLNQIVKLNYSGWGRLSEKLLTKEVNGRSLIDLMYSTENNFMEIITDKTLGFDCFIKNSNKVKNAKISYKDVAELRTSPALKKGIWNAIKMVREISNLFGAPEKIIIEFATEDQAKGKRQKSRSELWDDLVKKNNLKRNKEFEGLFEELKAYPDLDFSNPKLWLYIHQNGKCMYTKKPIDLERLMSDTNNQLYEIDHILPRTFVKDDSINNKVLVIQSANQKKSGDKMPLEIFDNHVLVPFWKMLYENDLISSSKLSKLMKKEFNDLDKEGFIQRQLVETRQIISHVSDFLTEEYPSTTVVPMKANVVSELRRKFDIPKIRQLNDWHHAVDAYLNGFVYQAARVFYPKVNLFEFNFKWEKVREKWRQLGEFTENNKKREFFLFKRMENYVNEYGEGMISKLIFDLDNFKFNYSRKVESTESAFYKQSAFSPKNTTAQYDSDKNKTAIYKEMKNKRGIVVSYTYVKKDQELIGYGVFNETVFEYVNNADVDMNTRALKIVRKAFPKLDIKKAQYLFSINKGDALLVNGHPFLFVSAYERINGKQLEFDIAMQRKIKQALSPYNNMTEQEKVEFYNQFAEKVIEEFRNSIGLQSRDRKVNLIKNLFNNTEKSNDSMTQSILEVLKMTKVSAERSKELKIRWNGQTPNTFIDTKNNAEIQYKSITGLKTTKPKSIFKLAESKNEL

SEQ ID NO: 248 - protein, 1274 aa, Mycoplasma gallisept
MNINMNNSIKSKPEVTIGLDLGVGSVGWAIVDNETNIIHHLGSRLFSQAKTAEDRRSFRGVRRLIRRRKYKLKRFVNLIWKYNSYFGFKNKEDILNNYQEQQKLHNTVLNLKLEALNAKIDPKALSWILHDYLKNRGHFYEDNRDFNVYPTEELANYFDEFGYYKGIIDSKNDDDDKLEEGLTKYKFSNQHWLEEVKKVLSNQTGLPEKFKEEYESLFSYVRNYSEGPGSINSVSPYGIYHLDEKEGKVVQKYNNIWDKTIGKCSIFPDEYRAPKNSPIAMIFNEINELSTIRSYSIYLTGWFINQEFKKAYLNKLLDLLIKTNSEKPIDARQFKKLREETIAESIGKETLKDVESEEKLEKDDHKWKLKGLKLNTNGKIQYNDLSSLAKFVHKLKQHLKLDFLLEDQYTPLDKINFLQSLYVYLGKHLRYSNRVDSANLKEFSDSSRLFERVLQEQKDGLFKLFEQTDKDDEKILTQTHSLSTKAMLLAITRMTNLDNDEDNQKNNDKGWNFEAIKNFDQKFIDITKTNNNLSLKQDKRYLDDQFINDAILSPGVKRILREATKVFNAILKQFSEEYDVTKVVIELARELSEEKELENTKNYKKLIKKNGDKISEGLKALGIAEDKIEEILKSPTKSYKVLLWLQQDHIDPYSQKEIAFDDILTKTEKTEIDHIIPYSISFDDSSSNKLLVLAESNQAKSNQTPYEFINSGKAEITWEVYEAYCHKFKNGDSSLLDSTQRSKKFAKMMKTDTSSKYDIGFLARNLNDTRYATIVFRDALKDYANNHLVEDKPMFKVVCINGGVTSFLRKNFDPKSWYAKKDRDKNIHHAVDASIISIFSNETKTLFNQLTKFADYKLFKNTDGSWKKIDPKTGVVSEVTDENWKQIRVRNQVSEIAKVIDKYIQDSNIERKARYSRKIENKTNISLFNDTVYSAKKVGYEDQIKRKNLKTLDIHESAEENKNSKVKKQFVYRKLVNVSLLNNDKLADLFAEKEDILMYRANPWVINLAEQIFNEYTENKKIKSQNVFEKYMLDLTKEFPEKFSEAFVKSMIRNKTAIIYNVEKDVVHRIKRLKILSSELKENKWSNVIIRSKNESGTKLSYQDTINSIALMIMRSIDPTAKKQYIRVPLNTLNLHLGDQDFDLHNIDAYLKKPKFVKYLKANEIGDEYKPWRVLTSGTLLIHKKDKKLMYISSFQNLNDLIEIKNLIETEYKENVDSDPKKKKKASQILRSLSVILNDYILLDAKYNFDILGLSKNKIDEILNSKLDLDKIAK

SEQ ID NO: 249 - protein, 1122 aa, Artificial Sequence; identical to SEQ ID NO: 18
  Synthetic Sequence

SEQ ID NO: 250 - protein, 1236 aa, Artificial Sequence; identical to SEQ ID NO: 16
  Synthetic Sequence

SEQ ID NO: 251 - protein, 1059 aa, Artificial Sequence; identical to SEQ ID NO: 10
  Synthetic Sequence

SEQ ID NO: 252 - protein, 1166 aa, Artificial Sequence; identical to SEQ ID NO: 34
  Synthetic Sequence

SEQ ID NO: 253 - protein, 1149 aa, Artificial Sequence; identical to SEQ ID NO: 32
  Synthetic Sequence

SEQ ID NO: 254 - protein, 1314 aa, Artificial Sequence; identical to SEQ ID NO: 22
  Synthetic Sequence

SEQ ID NO: 255 - protein, 1064 aa, Artificial Sequence; identical to SEQ ID NO: 33
  Synthetic Sequence

SEQ ID NO: 256 - protein, 1401 aa, Artificial Sequence
  Synthetic Sequence
MDKKYSIGLDIGTNSVGWAVITDEYKVPSKKFKVLGNTDRHSIKKNLIGALLFDSGETAEATRLKRTARRRYTRRKNRICYLQEIFSNEMAKVDDSFFHRLEESFLVEEDKKHERHPIFGNIVDEVAYHEKYPTIYHLRKKLVDSTDKADLRLIYLALAHMIKFRGHFLIEGDLNPDNSDVDKLFIQLVQTYNQLFEENPINASGVDAKAILSARLSKSRRLENLIAQLPGEKKNGLFGNLIALSLGLTPNFKSNFDLAEDAKLQLSKDTYDDDLDNLLAQIGDQYADLFLAAKNLSDAILLSDILRVNTEITKAPLSASMIKRYDEHHQDLTLLKALVRQQLPEKYKEIFFDQSKNGYAGYIDGGASQEEFYKFIKPILEKMDGTEELLVKLNREDLLRKQRTFDNGSIPHQIHLGELHAILRRQEDFYPFLKDNREKIEKILTFRIPYYVGPLARGNSRFAWMTRKSEETITPWNFEEVVDKGASAQSFIERMTNFDKNLPNEKVLPKHSLLYEYFTVYNELTKVKYVTEGMRKPAFLSGEQKKAIVDLLFKTNRKVTVKQLKEDYFKKIECFDSVEISGVEDRFNASLGTYHDLLKIIKDKDFLDNEENEDILEDIVLTLTLFEDREMIEERLKTYAHLFDDKVMKQLKRRRYTGWGRLSRKLINGIRDKQSGKTILDFLKSDGFANRNFMQLIHDDSLTFKEDIQKAQVSGQGDSLHEHIANLAGSPAIKKGILQTVKVVDELVKVMGRHKPENIVIEMARENQTTQKGQKNSRERMKRIEEGIKELGSQILKEHPVENTQLQNEKLYLYYLQNGRDMYVDQELDINRLSDYDVDHIVPQSFLKDDSIDNKVLTRSDKNRGKSDNVPSEEVVKKMKNYWRQLLNAKLITQRKFDNLTKAERGGLSELDKAGFIKRQLVETRQITKHVAQILDSRMNTKYDENDKLIREVKVITLKSKLVSDFRKDFQFYKVREINNYHHAHDAYLNAVVGTALIKKYPKLESEFVYGDYKVYDVRKMIAKSEQEIGKATAKYFFYSNIMNFFKTEITLANGEIRKRPLIETNGETGEIVWDKGRDFATVRKVLSMPQVNIVKKTEVQTGGFSKESILPKRNSDKLIARKKDWDPKKYGGFDSPTVAYSVLVVAKVEKGKSKKLKSVKELLGITIMERSSFEKNPIDFLEAKGYKEVKKDLIIKLPKYSLFELENGRKRMLASAGELQKGNELALPSKYVNFLYLASHYEKLKGSPEDNEQKQLFVEQHKHYLDEIIEQISEFSKRVILADANLDKVLSAYNKHRDKPIREQAENIIHLFTLTNLGAPAAFKYFDTTIDRKRYTSTKEVLDATLIHQSITGLYETRIDLSQLGGDAYPYDVPDYASLGSGSPKKKRKVEDPKKKRKVD

SEQ ID NO: 257 - protein, 1368 aa, Artificial Sequence
  Synthetic Sequence
MDKKYSIGLAIGTNSVGWAVITDDYKVPSKKLKGLGNTDRHGIKKNLIGALLFDSGETAEATRLKRTARRRYTRRKNRICYLQEIFSNEMAKVDDSFFHRLEESFLVEEDKKHERHPIFGNIVDEVAYHEKYPTIYHLRKKLADSTDKVDLRLIYLALAHMIKFRGHFLIEGDLNPDNSDVDKLFIQLVQTYNQLFEENPINASRVDAKAILSARLSKSRRLENLIAQLPGEKKNGLFGNLIALSLGLTPNFKSNFDLAEDAKLQLSKDTYDDDLDNLLAQIGDQYADLFLAAKNLSDATLLSDILRVNSEITKAPLSASMIKRYDEHHQDLTLLKALVRQQLPEKYKEIFFDQSKNGYAGYIDGGASQEEFYKFIKPILEKMDGTEELLAKLNREDLLRKQRTFDNGSIPYQIHLGELHAILRRQEDFYPFLKDNREKIEKILTFRIPYYVGPLARGNSRFAWMTRKSEETITPWNFEEVVDKGASAQSFIERMTNFDKNLPNEKVLPKHSLLYEYFTVYNELTKVKYVTEGMRKPAFLSGEQKKAIVDLLFKTNRKVTVKQLKEDYFKKIECFDSVEISGVEDRFNASLGTYHDLLKIIKDKDFLDNEENEDILEDIVLTLTLFEDREMIEERLKTYAHLFDDKVMKQLKRRRYTGWGRLSRKLINGIRDKQSGKTILDFLKSDGFANRNFMQLIHDDSLTFKEDIQKAQVSGQGDSLHEHIANLAGSPAIKKGILQTVKVVDELVKVMGRHKPENIVIEMARENQTTQKGQKNSRERMKRIEEGIKELGSDILKEYPVENTQLQNEKLYLYYLQNGRDMYVDQELDINRLSDYDVDHIVPQSFLKDDSIDNKVLTRSDKNRGKSDNVPSEEVVKKMKNYWRQLLNAKLITQRKFDNLTKAERGGLSELDKVGFIKRQLVETRQITKHVAQILDSRMNTKYDENDKLIREVRVITLKSKLVSDFRKDFQFYKVREINNYHHAHDAYLNAVVGTALIKKYPKLESEFVYGDYKVYDVRKMIAKSEQEIGKATAKYFFYSNIMNFFKTEITLANGEIRKRPLIETNGETGEIVWDKGRDFATVRKVLSMPQVNIVKKTEVQTGGFSKESILPKRNSDKLIARKKDWDPKKYGGFDSPTVAYSVLVVAKVEKGKSKKLKSVKELLGITIMERSSFEKDPIDFLEAKGYKEVRKDLIIKLPKYSLFELENGRKRMLASAGELQKGNELALPSKYVNFLYLASHYEKLKGSPEDNEQKQLFVEQHKHYLDEIIEQISEFSKRVILADANLDKVLSAYNKHRDKPIREQAENIIHLFTLTNLGAPAAFKYFDTTIDRKRYTSTKEVLDATLIHQSITGLYETRIDLSQLGGD

SEQ ID NO: 258 - protein, 1368 aa, Artificial Sequence
  Synthetic Sequence
MDKKYSIGLDIGTNSVGWAVITDDYKVPSKKLKGLGNTDRHGIKKNLIGALLFDSGETAEATRLKRTARRRYTRRKNRICYLQEIFSNEMAKVDDSFFHRLEESFLVEEDKKHERHPIFGNIVDEVAYHEKYPTIYHLRKKLADSTDKVDLRLIYLALAHMIKFRGHFLIEGDLNPDNSDVDKLFIQLVQTYNQLFEENPINASRVDAKAILSARLSKSRRLENLIAQLPGEKKNGLFGNLIALSLGLTPNFKSNFDLAEDAKLQLSKDTYDDDLDNLLAQIGDQYADLFLAAKNLSDATLLSDILRVNSEITKAPLSASMIKRYDEHHQDLTLLKALVRQQLPEKYKEIFFDQSKNGYAGYIDGGASQEEFYKFIKPILEKMDGTEELLAKLNREDLLRKQRTFDNGSIPYQIHLGELHAILRRQEDFYPFLKDNREKIEKILTFRIPYYVGPLARGNSRFAWMTRKSEETITPWNFEEVVDKGASAQSFIERMTNFDKNLPNEKVLPKHSLLYEYFTVYNELTKVKYVTEGMRKPAFLSGEQKKAIVDLLFKTNRKVTVKQLKEDYFKKIECFDSVEISGVEDRFNASLGTYHDLLKIIKDKDFLDNEENEDILEDIVLTLTLFEDREMIEERLKTYAHLFDDKVMKQLKRRRYTGWGRLSRKLINGIRDKQSGKTILDFLKSDGFANRNFMQLIHDDSLTFKEDIQKAQVSGQGDSLHEHIANLAGSPAIKKGILQTVKVVDELVKVMGRHKPENIVIEMARENQTTQKGQKNSRERMKRIEEGIKELGSDILKEYPVENTQLQNEKLYLYYLQNGRDMYVDQELDINRLSDYDVDAIVPQSFLKDDSIDNKVLTRSDKNRGKSDNVPSEEVVKKMKNYWRQLLNAKLITQRKFDNLTKAERGGLSELDKVGFIKRQLVETRQITKHVAQILDSRMNTKYDENDKLIREVRVITLKSKLVSDFRKDFQFYKVREINNYHHAHDAYLNAVVGTALIKKYPKLESEFVYGDYKVYDVRKMIAKSEQEIGKATAKYFFYSNIMNFFKTEITLANGEIRKRPLIETNGETGEIVWDKGRDFATVRKVLSMPQVNIVKKTEVQTGGFSKESILPKRNSDKLIARKKDWDPKKYGGFDSPTVAYSVLVVAKVEKGKSKKLKSVKELLGITIMERSSFEKDPIDFLEAKGYKEVRKDLIIKLPKYSLFELENGRKRMLASAGELQKGNELALPSKYVNFLYLASHYEKLKGSPEDNEQKQLFVEQHKHYLDEIIEQISEFSKRVILADANLDKVLSAYNKHRDKPIREQAENIIHLFTLTNLGAPAAFKYFDTTIDRKRYTSTKEVLDATLIHQSITGLYETRIDLSQLGGD

SEQ ID NO: 259 - protein, 1368 aa, Artificial Sequence
  Synthetic Sequence
MDKKYSIGLAIGTNSVGWAVITDDYKVPSKKLKGLGNTDRHGIKKNLIGALLFDSGETAEATRLKRTARRRYTRRKNRICYLQEIFSNEMAKVDDSFFHRLEESFLVEEDKKHERHPIFGNIVDEVAYHEKYPTIYHLRKKLADSTDKVDLRLIYLALAHMIKFRGHFLIEGDLNPDNSDVDKLFIQLVQTYNQLFEENPINASRVDAKAILSARLSKSRRLENLIAQLPGEKKNGLFGNLIALSLGLTPNFKSNFDLAEDAKLQLSKDTYDDDLDNLLAQIGDQYADLFLAAKNLSDATLLSDILRVNSEITKAPLSASMIKRYDEHHQDLTLLKALVRQQLPEKYKEIFFDQSKNGYAGYIDGGASQEEFYKFIKPILEKMDGTEELLAKLNREDLLRKQRTFDNGSIPYQIHLGELHAILRRQEDFYPFLKDNREKIEKILTFRIPYYVGPLARGNSRFAWMTRKSEETITPWNFEEVVDKGASAQSFIERMTNFDKNLPNEKVLPKHSLLYEYFTVYNELTKVKYVTEGMRKPAFLSGEQKKAIVDLLFKTNRKVTVKQLKEDYFKKIECFDSVEISGVEDRFNASLGTYHDLLKIIKDKDFLDNEENEDILEDIVLTLTLFEDREMIEERLKTYAHLFDDKVMKQLKRRRYTGWGRLSRKLINGIRDKQSGKTILDFLKSDGFANRNFMQLIHDDSLTFKEDIQKAQVSGQGDSLHEHIANLAGSPAIKKGILQTVKVVDELVKVMGRHKPENIVIEMARENQTTQKGQKNSRERMKRIEEGIKELGSDILKEYPVENTQLQNEKLYLYYLQNGRDMYVDQELDINRLSDYDVDAIVPQSFLKDDSIDNKVLTRSDKNRGKSDNVPSEEVVKKMKNYWRQLLNAKLITQRKFDNLTKAERGGLSELDKVGFIKRQLVETRQITKHVAQILDSRMNTKYDENDKLIREVRVITLKSKLVSDFRKDFQFYKVREINNYHHAHDAYLNAVVGTALIKKYPKLESEFVYGDYKVYDVRKMIAKSEQEIGKATAKYFFYSNIMNFFKTEITLANGEIRKRPLIETNGETGEIVWDKGRDFATVRKVLSMPQVNIVKKTEVQTGGFSKESILPKRNSDKLIARKKDWDPKKYGGFDSPTVAYSVLVVAKVEKGKSKKLKSVKELLGITIMERSSFEKDPIDFLEAKGYKEVRKDLIIKLPKYSLFELENGRKRMLASAGELQKGNELALPSKYVNFLYLASHYEKLKGSPEDNEQKQLFVEQHKHYLDEIIEQISEFSKRVILADANLDKVLSAYNKHRDKPIREQAENIIHLFTLTNLGAPAAFKYFDTTIDRKRYTSTKEVLDATLIHQSITGLYETRIDLSQLGGD

SEQ ID NO: 260 - protein, 15 aa, Artificial Sequence
  Synthetic Sequence
IGLDIGTNSVGWAVI

SEQ ID NO: 261 - protein, 8 aa, Artificial Sequence
  Synthetic Sequence
IVIEMARE

SEQ ID NO: 262 - protein, 27 aa, Artificial Sequence
  Synthetic Sequence
DVDHIVPQSFLKDDSIDNKVLTRSDKN

SEQ ID NO: 263 - protein, 8 aa, Artificial Sequence
  Synthetic Sequence
HHAHDAYL

SEQ ID NO: 264 - protein, 11 aa, Artificial Sequence
  Synthetic Sequence
YGRKKRRQRRR

SEQ ID NO: 265 - protein, 12 aa, Artificial Sequence
  Synthetic Sequence
RRQRRTSKLMKR

SEQ ID NO: 266 - protein, 27 aa, Artificial Sequence
  Synthetic Sequence
GWTLNSAGYLLGKINLKALAALAKKIL

SEQ ID NO: 267 - protein, 33 aa, Artificial Sequence
  Synthetic Sequence
KALAWEAKLAKALAKALAKHLAKALAKALKCEA

SEQ ID NO: 268 - protein, 16 aa, Artificial Sequence
  Synthetic Sequence
RQIKIWFQNRRMKWKK

SEQ ID NO: 269 - protein, 9 aa, Artificial Sequence
  Synthetic Sequence
RKKRRQRRR

SEQ ID NO: 270 - protein, 8 aa, Artificial Sequence
  Synthetic Sequence
RKKRRQRR

SEQ ID NO: 271 - protein, 11 aa, Artificial Sequence
  Synthetic Sequence
YARAAARQARA

SEQ ID NO: 272 - protein, 11 aa, Artificial Sequence
  Synthetic Sequence
THRLPRRRRRR

SEQ ID NO: 273 - protein, 11 aa, Artificial Sequence
  Synthetic Sequence
GGRRARRRRRR

SEQ ID NO: 274 - protein, 13 aa, Artificial Sequence
  Synthetic Sequence
DAYPYDVPDYASL

SEQ ID NO: 275 - protein, 17 aa, Artificial Sequence
  Synthetic Sequence
PKKKRKVEDPKKKRKVD

SEQ ID NO: 276 - DNA, 4206 bp, Artificial Sequence
  Synthetic Sequence
atggacaagaagtacagcatcggcctggacatcggcaccaactctgtgggctgggccgtgatcaccgacgagtacaaggtgcccagcaagaaattcaaggtgctgggcaacaccgaccggcacagcatcaagaagaacctgatcggcgccctgctgttcgacagcggagaaacagccgaggccacccggctgaagagaaccgccagaagaagatacaccagacggaagaaccggatctgctatctgcaagagatcttcagcaacgagatggccaaggtggacgacagcttcttccacagactggaagagtccttcctggtggaagaggataagaagcacgagcggcaccccatcttcggcaacatcgtggacgaggtggcctaccacgagaagtaccccaccatctaccacctgagaaagaaactggtggacagcaccgacaaggccgacctgcggctgatctatctggccctggcccacatgatcaagttccggggccacttcctgatcgagggcgacctgaaccccgacaacagcgacgtggacaagctgttcatccagctggtgcagacctacaaccagctgttcgaggaaaaccccatcaacgccagcggcgtggacgccaaggccatcctgtctgccagactgagcaagagcagacggctggaaaatctgatcgcccagctgcccggcgagaagaagaatggcctgttcggcaacctgattgccctgagcctgggcctgacccccaacttcaagagcaacttcgacctggccgaggatgccaaactgcagctgagcaaggacacctacgacgacgacctggacaacctgctggcccagatcggcgaccagtacgccgacctgtttctggccgccaagaacctgtccgacgccatcctgctgagcgacatcctgagagtgaacaccgagatcaccaaggcccccctgagcgcctctatgatcaagagatacgacgagcaccaccaggacctgaccctgctgaaagctctcgtgcggcagcagctgcctgagaagtacaaagagattttcttcgaccagagcaagaacggctacgccggctacatcgatggcggagccagccaggaagagttctacaagttcatcaagcccatcctggaaaagatggacggcaccgaggaactgctcgtgaagctgaacagagaggacctgctgcggaagcagcggaccttcgacaacggcagcatcccccaccagatccacctgggagagctgcacgccattctgcggcggcaggaagatttttacccattcctgaaggacaaccgggaaaagatcgagaagatcctgaccttccgcatcccctactacgtgggccctctggccaggggaaacagcagattcgcctggatgaccagaaagagcgaggaaaccatcaccccctggaacttcgaggaagtggtggacaagggcgccagcgcccagagcttcatcgagcggatgaccaacttcgataagaacctgcccaacgagaaggtgctgcccaagcacagcctgctgtacgagtacttcaccgtgtacaacgagctgaccaaagtgaaatacgtgaccgagggaatgagaaagcccgccttcctgagcggcgagcagaaaaaagccatcgtggacctgctgttcaagaccaaccggaaagtgaccgtgaagcagctgaaagaggactacttcaagaaaatcgagtgcttcgactccgtggaaatctccggcgtggaagatcggttcaacgcctccctgggcacataccacgatctgctgaaaattatcaaggacaaggacttcctggacaatgaggaaaacgaggacattctggaagatatcgtgctgaccctgacactgtttgaggacagagagatgatcgaggaacggctgaaaacctatgcccacctgttcgacgacaaagtgatgaagcagctgaagcggcggagatacaccggctggggcaggctgagccggaagctgatcaacggcatccgggacaagcagtccggcaagacaatcctggatttcctgaagtccgacggcttcgccaacagaaacttcatgcagctgatccacgacgacagcctgacctttaaagaggacatccagaaagcccaggtgtccggccagggcgatagcctgcacgagcacattgccaatctggccggcagccccgccattaagaagggcatcctgcagacagtgaaggtggtggacgagctcgtgaaagtgatgggccggcacaagcccgagaacatcgtgatcgaaatggccagagagaaccagaccacccagaagggacagaagaacagccgcgagagaatgaagcggatcgaagagggcatcaaagagctgggcagccagatcctgaaagaacaccccgtggaaaacacccagctgcagaacgagaagctgtacctgtactacctgcagaatgggcgggatatgtacgtggaccaggaactggacatcaaccggctgtccgactacgatgtggaccatatcgtgcctcagagctttctgaaggacgactccatcgataacaaagtgctgactcggagcgacaagaaccggggcaagagcgacaacgtgccctccgaagaggtcgtgaagaagatgaagaactactggcgccagctgctgaatgccaagctgattacccagaggaagttcgacaatctgaccaaggccgagagaggcggcctgagcgaactggataaggccggcttcatcaagagacagctggtggaaacccggcagatcacaaagcacgtggcacagatcctggactcccggatgaacactaagtacgacgagaacgacaaactgatccgggaagtgaaagtgatcaccctgaagtccaagctggtgtccgatttccggaaggatttccagttttacaaagtgcgcgagatcaacaactaccaccacgcccacgacgcctacctgaacgccgtcgtgggaaccgccctgatcaaaaagtaccctaagctggaaagcgagttcgtgtacggcgactacaaggtgtacgacgtgcggaagatgatcgccaagagcgagcaggaaatcggcaaggctaccgccaagtacttcttctacagcaacatcatgaactttttcaagaccgagattaccctggccaacggcgagatccggaagcggcctctgatcgagacaaacggcgaaacaggcgagatcgtgtgggataagggccgggactttgccaccgtgcggaaagtgctgtctatgccccaagtgaatatcgtgaaaaagaccgaggtgcagacaggcggcttcagcaaagagtctatcctgcccaagaggaacagcgacaagctgatcgccagaaagaaggactgggaccctaagaagtacggcggcttcgacagccccaccgtggcctattctgtgctggtggtggccaaagtggaaaagggcaagtccaagaaactgaagagtgtgaaagagctgctggggatcaccatcatggaaagaagcagcttcgagaagaatcccatcgactttctggaagccaagggctacaaagaagtgaaaaaggacctgatcatcaagctgcctaagtactccctgttcgagctggaaaacggccggaagagaatgctggcctctgccggcgaactgcagaagggaaacgaactggccctgccctccaaatatgtgaacttcctgtacctggccagccactatgagaagctgaagggctcccccgaggataatgagcagaaacagctgtttgtggaacagcacaaacactacctggacgagatcatcgagcagatcagcgagttctccaagagagtgatcctggccgacgctaatctggacaaggtgctgagcgcctacaacaagcacagagacaagcctatcagagagcaggccgagaatatcatccacctgtttaccctgaccaatctgggagcccctgccgccttcaagtactttgacaccaccatcgaccggaagaggtacaccagcaccaaagaggtgctggacgccaccctgatccaccagagcatcaccggcctgtacgagacacggatcgacctgtctcagctgggaggcgacgcctatccctatgacgtgcccgattatgccagcctgggcagcggctcccccaagaaaaaacgcaaggtggaagatcctaagaaaaagcggaaagtggactga

SEQ ID NO: 277 - protein, 1401 aa, Artificial Sequence; identical to SEQ ID NO: 256
  Synthetic Sequence

SEQ ID NO: 278 - DNA, 50 bp, Artificial Sequence
  Synthetic Sequence
ttatatgaacataactcaatttgtaaaaaagggtattggggaattcatta

SEQ ID NO: 279 - DNA, 50 bp, Artificial Sequence
  Synthetic Sequence
taatgaattccccaatacccttttttacaaattgagttatgttcatataa

SEQ ID NO: 280 - RNA, 42 nt, Artificial Sequence
  Synthetic Sequence
auaacucaauuuguaaaaaaguuuuagagcuaugcuguuuug

SEQ ID NO: 281 - DNA, 27 bp, Artificial Sequence
  Synthetic Sequence
aacataactcaatttgtaaaaaagggt

SEQ ID NO: 282 - DNA, 27 bp, Artificial Sequence
  Synthetic Sequence
acccttttttacaaattgagttatgtt

SEQ ID NO: 283 - RNA, 25 nt, Artificial Sequence
  Synthetic Sequence
auaacucaauuuguaaaaaaguuuu

SEQ ID NO: 284 - DNA, 23 bp, Artificial Sequence
  Synthetic Sequence
agcataactcaatttgtaaaaaa

SEQ ID NO: 285 - DNA, 23 bp, Artificial Sequence
  Synthetic Sequence
aacataactcaatctgtaaaaaa

SEQ ID NO: 286 - DNA, 23 bp, Artificial Sequence
  Synthetic Sequence
aacataactcaatttgaaaaaaa

SEQ ID NO: 287 - DNA, 23 bp, Artificial Sequence
  Synthetic Sequence
aacataactcaatttgttaaaaa

SEQ ID NO: 288 - DNA, 23 bp, Artificial Sequence
  Synthetic Sequence
aacataactcaatttgtataaaa

SEQ ID NO: 289 - DNA, 23 bp, Artificial Sequence
  Synthetic Sequence
aacataactcaatttgtaataaa

SEQ ID NO: 290 - DNA, 23 bp, Artificial Sequence
  Synthetic Sequence
aacataactcaatttgtaaataa

SEQ ID NO: 291 - DNA, 27 bp, Artificial Sequence
  Synthetic Sequence
aacataactcaatttgtaaaaaatggc

SEQ ID NO: 292 - DNA, 27 bp, Artificial Sequence
  Synthetic Sequence
gccattttttacaaattgagttatgtt

SEQ ID NO: 293 - DNA, 20 bp, Artificial Sequence
  Synthetic Sequence
tattgagttaaagtaaaaaa

SEQ ID NO: 294 - DNA, 20 bp, Artificial Sequence
  Synthetic Sequence
tattgagttattgtaaaaaa

SEQ ID NO: 295 - DNA, 20 bp, Artificial Sequence
  Synthetic Sequence
tattgagtatttgtaaaaaa

SEQ ID NO: 296 - DNA, 20 bp, Artificial Sequence
  Synthetic Sequence
tattgacaatttgtaaaaaa

SEQ ID NO: 297 - DNA, 20 bp, Artificial Sequence
  Synthetic Sequence
tattctcaatttgtaaaaaa

SEQ ID NO: 298 - DNA, 20 bp, Artificial Sequence
  Synthetic Sequence
taaactcaatttgtaaaaaa

SEQ ID NO: 299 - RNA, 62 nt, Artificial Sequence
  Synthetic Sequence
aaaaauuaggugcgcuuggcguuuuagagcuagaaauagcaaguuaaaauaaggcuaguccg

SEQ ID NO: 300 - RNA, 54 nt, Artificial Sequence
  Synthetic Sequence
aaaaauuaggugcgcuuggcguuuuagagcuagaaauagcaaguuaaaauaagg

SEQ ID NO: 301 - DNA, 50 bp, Artificial Sequence
  Synthetic Sequence
tgcgctggttgatttcttcttgcgctttttgggtattggggaattcatta

SEQ ID NO: 302 - DNA, 50 bp, Artificial Sequence
  Synthetic Sequence
taatgaattccccaatacccaaaaagcgcaagaagaaatcaaccagcgca

SEQ ID NO: 303 - RNA, 42 nt, Artificial Sequence
  Synthetic Sequence
gauuucuucuugcgcuuuuuguuuuagagcuaugcuguuuug

SEQ ID NO: 304 - DNA, 50 bp, Artificial Sequence
  Synthetic Sequence
ggttatattaagtgccgaggaaaaattaggtgcgcttggctggcgcatta

SEQ ID NO: 305 - DNA, 50 bp, Artificial Sequence
  Synthetic Sequence
taatgcgccagccaagcgcacctaatttttcctcggcacttaatataacc

SEQ ID NO: 306 - RNA, 42 nt, Artificial Sequence
  Synthetic Sequence
aaaaauuaggugcgcuuggcguuuuagagcuaugcuguuuug

SEQ ID NO: 307 - DNA, 50 bp, Artificial Sequence
  Synthetic Sequence
tacgctggttgatttcttcttgcgcttttttggctttttcgagttcggct

SEQ ID NO: 308 - DNA, 50 bp, Artificial Sequence
  Synthetic Sequence
agccgaactcgaaaaagccaaaaaagcgcaagaagaaatcaaccagcgta

SEQ ID NO: 309 - RNA, 42 nt, Artificial Sequence; identical to SEQ ID NO: 303
  Synthetic Sequence

SEQ ID NO: 310 - DNA, 14 bp, Artificial Sequence
  Synthetic Sequence
taatgcgccagcca

SEQ ID NO: 311 - RNA, 42 nt, Artificial Sequence; identical to SEQ ID NO: 306
  Synthetic Sequence

SEQ ID NO: 312 - DNA, 25 bp, Artificial Sequence
  Synthetic Sequence
ataactcaatttgtaaaaaagggta

SEQ ID NO: 313 - DNA, 25 bp, Artificial Sequence
  Synthetic Sequence
ataactcaatttgtaaaaaagcgta

SEQ ID NO: 314 - DNA, 25 bp, Artificial Sequence
  Synthetic Sequence
ataactcaatttgtaaaaaagccta

SEQ ID NO: 315 - DNA, 26 bp, Artificial Sequence
  Synthetic Sequence
aaaaattaggtgcgcttggctggcgc

SEQ ID NO: 316 - DNA, 26 bp, Artificial Sequence
  Synthetic Sequence
aaaaattaggtgcgcttggctcgcgc

SEQ ID NO: 317 - DNA, 26 bp, Artificial Sequence
  Synthetic Sequence
aaaaattaggtgcgcttggctgccgc

SEQ ID NO: 318 - DNA, 26 bp, Artificial Sequence
  Synthetic Sequence
aaaaattaggtgcgcttggctggccc

SEQ ID NO: 319 - DNA, 26 bp, Artificial Sequence
  Synthetic Sequence
aaaaattaggtgcgcttggctccccc

SEQ ID NO: 320 - DNA, 21 bp, Artificial Sequence
  Synthetic Sequence
aaaaattaggtgcgcttggct

SEQ ID NO: 321 - RNA, 62 nt, Artificial Sequence
  Synthetic Sequence
gauuucuucuugcgcuuuuuguuuuagagcuagaaauagcaaguuaaaauaaggcuaguccg

SEQ ID NO: 322 - RNA, 54 nt, Artificial Sequence
  Synthetic Sequence
gauuucuucuugcgcuuuuuguuuuagagcuagaaauagcaaguuaaaauaagg

SEQ ID NO: 323 - RNA, 62 nt, Artificial Sequence
  Synthetic Sequence
auaacucaauuuguaaaaaaguuuuagagcuagaaauagcaaguuaaaauaaggcuaguccg

SEQ ID NO: 324 - RNA, 54 nt, Artificial Sequence
  Synthetic Sequence
auaacucaauuuguaaaaaaguuuuagagcuagaaauagcaaguuaaaauaagg

SEQ ID NO: 325 - DNA, 120 bp, Artificial Sequence
  Synthetic Sequence
gtcccaattcttgttgaattagatggtgatgttaatgggcacaaattttctgtcagtggagagggtgaaggtgatgcaacatacggaaaacttacccttaaatttatttgcactactgga

SEQ ID NO: 326 - DNA, 120 bp, Artificial Sequence
  Synthetic Sequence
tccagtagtgcaaataaatttaagggtaagttttccgtatgttgcatcaccttcaccctctccactgacagaaaatttgtgcccattaacatcaccatctaattcaacaagaattgggac

SEQ ID NO: 327 - DNA, 26 bp, Artificial Sequence
  Synthetic Sequence
ccaattcttgttgaattagatggtga

SEQ ID NO: 328 - DNA, 26 bp, Artificial Sequence
  Synthetic Sequence
aattagatggtgatgttaatgggcac

SEQ ID NO: 329 - DNA, 26 bp, Artificial Sequence
  Synthetic Sequence
aaattttctgtcagtggagagggtga

SEQ ID NO: 330 - DNA, 26 bp, Artificial Sequence
  Synthetic Sequence
catctaattcaacaagaattgggaca

SEQ ID NO: 331 - DNA, 26 bp, Artificial Sequence
  Synthetic Sequence
cagtagtgcaaataaatttaagggta

SEQ ID NO: 332 - RNA, 68 nt, Artificial Sequence
  Synthetic Sequence
ccaauucuuguugaauuagauggugaguuuuagagcuagaaauagcaaguuaaaauaaggcuaguccg

SEQ ID NO: 333 - RNA, 68 nt, Artificial Sequence
  Synthetic Sequence
aauuagauggugauguuaaugggcacguuuuagagcuagaaauagcaaguuaaaauaaggcuaguccg

SEQ ID NO: 334 - RNA, 68 nt, Artificial Sequence
  Synthetic Sequence
aaauuuucugucaguggagagggugaguuuuagagcuagaaauagcaaguuaaaauaaggcuaguccg

SEQ ID NO: 335 - RNA, 68 nt, Artificial Sequence
  Synthetic Sequence
caucuaauucaacaagaauugggacaguuuuagagcuagaaauagcaaguuaaaauaaggcuaguccg

SEQ ID NO: 336 - RNA, 68 nt, Artificial Sequence
  Synthetic Sequence
caguagugcaaauaaauuuaaggguaguuuuagagcuagaaauagcaaguuaaaauaaggcuaguccg

SEQ ID NO: 337 - DNA, 50 bp, Artificial Sequence
  Synthetic Sequence
ggttatattaagtgccgaggaaaaattaggtgcgcttggctgccgcatta

SEQ ID NO: 338 - DNA, 50 bp, Artificial Sequence
  Synthetic Sequence
taatgcggcagccaagcgcacctaatttttcctcggcacttaatataacc

SEQ ID NO: 339 - RNA, 42 nt, Artificial Sequence; identical to SEQ ID NO: 306
  Synthetic Sequence

SEQ ID NO: 340 - DNA, 59 bp, Artificial Sequence
  Synthetic Sequence
gaaattaatacgactcactatagaaaacagcatagcaagttaaaataaagttaaaataa

SEQ ID NO: 341 - DNA, 25 bp, Artificial Sequence
  Synthetic Sequence
aaaaaaagcaccgactcggtgccac

SEQ ID NO: 342 - DNA, 66 bp, Artificial Sequence
  Synthetic Sequence
gaaattaatacgactcactatagggatttcttcttgcgctttttgttttagagctatgctgttttg

SEQ ID NO: 343 - DNA, 66 bp, Artificial Sequence
  Synthetic Sequence
caaaacagcatagctctaaaacaaaaagcgcaagaagaaatccctatagtgagtcgtattaatttc

SEQ ID NO: 344 - DNA, 66 bp, Artificial Sequence
  Synthetic Sequence
gaaattaatacgactcactataggataactcaatttgtaaaaaagttttagagctatgctgttttg

SEQ ID NO: 345 - DNA, 66 bp, Artificial Sequence
  Synthetic Sequence
caaaacagcatagctctaaaacttttttacaaattgagttatcctatagtgagtcgtattaatttc

SEQ ID NO: 346 - DNA, 51 bp, Artificial Sequence
  Synthetic Sequence
gaaattaatacgactcactatagatgatgagaaccgttgctacaataaggc

SEQ ID NO: 347 - DNA, 24 bp, Artificial Sequence
  Synthetic Sequence
aaataaacgatgccccttaaagca

SEQ ID NO: 348 - DNA, 68 bp, Artificial Sequence
  Synthetic Sequence
gaaattaatacgactcactatagatgataactcaatttgtaaaaaagttgtagctccctttctcattt

SEQ ID NO: 349 - DNA, 68 bp, Artificial Sequence
  Synthetic Sequence
aaatgagaaagggagctacaacttttttacaaattgagttatcatctatagtgagtcgtattaatttc

SEQ ID NO: 350 - DNA, 51 bp, Artificial Sequence
  Synthetic Sequence
gaaattaatacgactcactatagatgaaataacatagcaagttaaaataag

SEQ ID NO: 351 - DNA, 31 bp, Artificial Sequence
  Synthetic Sequence
aaaaaaagcgccgaaacagcgctacttaatt

SEQ ID NO: 352 - DNA, 68 bp, Artificial Sequence
  Synthetic Sequence
gaaattaatacgactcactatagatgataactcaatttgtaaaaaagttttagagctatgttattttg

SEQ ID NO: 353 - DNA, 68 bp, Artificial Sequence
  Synthetic Sequence
caaaataacatagctctaaaacttttttacaaattgagttatcatctatagtgagtcgtattaatttc

SEQ ID NO: 354 - DNA, 35 bp, Artificial Sequence
  Synthetic Sequence
atgcacctgcaggatgctgttaaataattgtatac

SEQ ID NO: 355 - DNA, 36 bp, Artificial Sequence
  Synthetic Sequence
atgcacggatccagctgctctaagtctactaaaacc

SEQ ID NO: 356 - DNA, 39 bp, Artificial Sequence
  Synthetic Sequence
atgcagggccggccgtgacagagagaaacttgattcaac

SEQ ID NO: 357 - DNA, 39 bp, Artificial Sequence
  Synthetic Sequence
atgcagggccggcccttcgtttaagtaaacatcaaagtg

SEQ ID NO: 358 - DNA, 59 bp, Artificial Sequence
  Synthetic Sequence
atgagcgataatagaataaagttatatgagcataactcaatttgtaaaaaagggtattg

SEQ ID NO: 359 - DNA, 59 bp, Artificial Sequence
  Synthetic Sequence
caatacccttttttacaaattgagttatgctcatataactttattctattatcgctcat

SEQ ID NO: 360 - DNA, 57 bp, Artificial Sequence
  Synthetic Sequence
gcgataatagaataaagttatatgaacataactcaatctgtaaaaaagggtattggg

SEQ ID NO: 361 - DNA, 57 bp, Artificial Sequence
  Synthetic Sequence
cccaatacccttttttacagattgagttatgttcatataactttattctattatcgc

SEQ ID NO: 362 - DNA, 40 bp, Artificial Sequence
  Synthetic Sequence
gaacataactcaatttgaaaaaaagggtattggggaattc

SEQ ID NO: 363 - DNA, 40 bp, Artificial Sequence
  Synthetic Sequence
gaattccccaataccctttttttcaaattgagttatgttc

SEQ ID NO: 364 - DNA, 40 bp, Artificial Sequence
  Synthetic Sequence
gaacataactcaatttgttaaaaagggtattggggaattc

SEQ ID NO: 365 - DNA, 40 bp, Artificial Sequence
  Synthetic Sequence
gaattccccaataccctttttaacaaattgagttatgttc

SEQ ID NO: 366 - DNA, 43 bp, Artificial Sequence
  Synthetic Sequence
gaacataactcaatttgtataaaagggtattggggaattcatt

SEQ ID NO: 367 - DNA, 43 bp, Artificial Sequence
  Synthetic Sequence
aatgaattccccaatacccttttatacaaattgagttatgttc

SEQ ID NO: 368 - DNA, 43 bp, Artificial Sequence
  Synthetic Sequence
gaacataactcaatttgtaataaagggtattggggaattcatt

SEQ ID NO: 369 - DNA, 43 bp, Artificial Sequence
  Synthetic Sequence
aatgaattccccaataccctttattacaaattgagttatgttc

SEQ ID NO: 370 - DNA, 40 bp, Artificial Sequence
  Synthetic Sequence
cataactcaatttgtaaataagggtattggggaattcatt

SEQ ID NO: 371 - DNA, 40 bp, Artificial Sequence
  Synthetic Sequence
aatgaattccccaatacccttatttacaaattgagttatg

SEQ ID NO: 372 - DNA, 46 bp, Artificial Sequence
  Synthetic Sequence
cataactcaatttgtaaaaaagcgtattggggaattcattataaag

SEQ ID NO: 373 - DNA, 46 bp, Artificial Sequence
  Synthetic Sequence
ctttataatgaattccccaatacgcttttttacaaattgagttatg

SEQ ID NO: 374 - DNA, 44 bp, Artificial Sequence
  Synthetic Sequence
cataactcaatttgtaaaaaagcctattggggaattcattataa

SEQ ID NO: 375 - DNA, 44 bp, Artificial Sequence
  Synthetic Sequence
ttataatgaattccccaataggcttttttacaaattgagttatg

SEQ ID NO: 376 - DNA, 38 bp, Artificial Sequence
  Synthetic Sequence
atgcagggccggccagtatcagcgtacttggatttggg

SEQ ID NO: 377 - DNA, 37 bp, Artificial Sequence
  Synthetic Sequence
atgcagggccggccttgtctcactcactctatttttg

SEQ ID NO: 378 - DNA, 30 bp, Artificial Sequence
  Synthetic Sequence
gatttcttgcgcttttttggctttttcgag

SEQ ID NO: 379 - DNA, 30 bp, Artificial Sequence
  Synthetic Sequence
gggatggcaatccatgggtcaaggtactag

SEQ ID NO: 380 - DNA, 20 bp, Artificial Sequence
  Synthetic Sequence
ggaacgaaaactcacgttaa

SEQ ID NO: 381 - DNA, 25 bp, Artificial Sequence
  Synthetic Sequence
tgagagtgtcttttcagatgctgtg

SEQ ID NO: 382 - DNA, 21 bp, Artificial Sequence
  Synthetic Sequence
agcggtatctgttccccaaaa

SEQ ID NO: 383 - DNA, 21 bp, Artificial Sequence
  Synthetic Sequence
gttaaaaaccacgtaaccaca

SEQ ID NO: 384 - RNA, 42 nt, Artificial Sequence; identical to SEQ ID NO: 303
  Synthetic Sequence

SEQ ID NO: 385 - RNA, 42 nt, Artificial Sequence; identical to SEQ ID NO: 280
  Synthetic Sequence

SEQ ID NO: 386 - RNA, 42 nt, Artificial Sequence; identical to SEQ ID NO: 306
  Synthetic Sequence

SEQ ID NO: 387 - RNA, 36 nt, Artificial Sequence
  Synthetic Sequence
auaacucaauuuguaaaaaaguuuuagagcuaugcu

SEQ ID NO: 388 - RNA, 32 nt, Artificial Sequence
  Synthetic Sequence
auaacucaauuuguaaaaaaguuuuagagcua

SEQ ID NO: 389 - RNA, 22 nt, Artificial Sequence
  Synthetic Sequence
uuguaaaaaaguuuuagagcua

SEQ ID NO: 390 - RNA, 89 nt, Artificial Sequence
  Synthetic Sequence
guuggaaccauucaaaacagcauagcaaguuaaaauaaggcuaguccguuaucaacuugaaaaaguggcaccgagucggugcuuuuuuu

SEQ ID NO: 391 - RNA, 74 nt, Artificial Sequence
  Synthetic Sequence
aacagcauagcaaguuaaaauaaggcuaguccguuaucaacuugaaaaaguggcaccgagucggugcuuuuuuu

SEQ ID NO: 392 - RNA, 67 nt, Artificial Sequence
  Synthetic Sequence
uagcaaguuaaaauaaggcuaguccguuaucaacuugaaaaaguggcaccgagucggugcuuuuuuu

SEQ ID NO: 393 - RNA, 39 nt, Artificial Sequence
  Synthetic Sequence
aaacagcauagcaaguuaaaauaaggcuaguccguuauc

SEQ ID NO: 394 - RNA, 30 nt, Artificial Sequence
  Synthetic Sequence
aaacagcauagcaaguuaaaauaaggcuag

SEQ ID NO: 395 - RNA, 22 nt, Artificial Sequence
  Synthetic Sequence
aaacagcauagcaaguuaaaau

SEQ ID NO: 396 - RNA, 31 nt, Artificial Sequence
  Synthetic Sequence
uagcaaguuaaaauaaggcuaguccguuauc

SEQ ID NO: 397 - RNA, 26 nt, Artificial Sequence
  Synthetic Sequence
uagcaaguuaaaauaaggcuaguccg

SEQ ID NO: 398 - RNA, 22 nt, Artificial Sequence
  Synthetic Sequence
uagcaaguuaaaauaaggcuag

SEQ ID NO: 399 - RNA, 26 nt, Artificial Sequence
  Synthetic Sequence
guuggaaccauucaaaacagcauagc

SEQ ID NO: 400 - RNA, 62 nt, Artificial Sequence; identical to SEQ ID NO: 321
  Synthetic Sequence

SEQ ID NO: 401 - RNA, 54 nt, Artificial Sequence; identical to SEQ ID NO: 322
  Synthetic Sequence

SEQ ID NO: 402 - RNA, 62 nt, Artificial Sequence; identical to SEQ ID NO: 323
  Synthetic Sequence

SEQ ID NO: 403 - RNA, 54 nt, Artificial Sequence; identical to SEQ ID NO: 324
  Synthetic Sequence

SEQ ID NO: 404 - RNA, 62 nt, Artificial Sequence; identical to SEQ ID NO: 299
  Synthetic Sequence

SEQ ID NO: 405 - RNA, 54 nt, Artificial Sequence; identical to SEQ ID NO: 300
  Synthetic Sequence

SEQ ID NO: 406 - RNA, 62 nt, Artificial Sequence
  Synthetic Sequence
ccaauucuuguugaauuagaguuuuagagcuagaaauagcaaguuaaaauaaggcuaguccg

SEQ ID NO: 407 - RNA, 62 nt, Artificial Sequence
  Synthetic Sequence
aauuagauggugauguuaauguuuuagagcuagaaauagcaaguuaaaauaaggcuaguccg

SEQ ID NO: 408 - RNA, 62 nt, Artificial Sequence
  Synthetic Sequence
aaauuuucugucaguggagaguuuuagagcuagaaauagcaaguuaaaauaaggcuaguccg

SEQ ID NO: 409 - RNA, 62 nt, Artificial Sequence
  Synthetic Sequence
caucuaauucaacaagaauuguuuuagagcuagaaauagcaaguuaaaauaaggcuaguccg

SEQ ID NO: 410 - RNA, 61 nt, Artificial Sequence
  Synthetic Sequence
caguagugcaaauaaauuuaguuuuagagcuagaaauagcaaguuaaaauaaggcuagccg

SEQ ID NO: 411 - DNA, 50 bp, Artificial Sequence; identical to SEQ ID NO: 302
  Synthetic Sequence

SEQ ID NO: 412 - DNA, 50 bp, Artificial Sequence; identical to SEQ ID NO: 301
  Synthetic Sequence

SEQ ID NO: 413 - DNA, 50 bp, Artificial Sequence; identical to SEQ ID NO: 279
  Synthetic Sequence

SEQ ID NO: 414 - DNA, 50 bp, Artificial Sequence; identical to SEQ ID NO: 278
  Synthetic Sequence

SEQ ID NO: 415 - DNA, 50 bp, Artificial Sequence; identical to SEQ ID NO: 305
  Synthetic Sequence

SEQ ID NO: 416 - DNA, 50 bp, Artificial Sequence; identical to SEQ ID NO: 304
  Synthetic Sequence

SEQ ID NO: 417 - DNA, 50 bp, Artificial Sequence
  Synthetic Sequence
taatgaattccccaataggcttttttacaaattgagttatgttcatataa

SEQ ID NO: 418 - DNA, 50 bp, Artificial Sequence
  Synthetic Sequence
ttatatgaacataactcaatttgtaaaaaagcctattggggaattcatta

SEQ ID NO: 419 - DNA, 50 bp, Artificial Sequence
  Synthetic Sequence
taatgaattcccgttatggcttttttacaaattgagttatgttcatataa

SEQ ID NO: 420 - DNA, 50 bp, Artificial Sequence
  Synthetic Sequence
ttatatgaacataactcaatttgtaaaaaagccataacgggaattcatta

SEQ ID NO: 421 - DNA, 50 bp, Artificial Sequence
  Synthetic Sequence
taatgcgcgagccaagcgcacctaatttttcctcggcacttaatataacc

SEQ ID NO: 422 - DNA, 50 bp, Artificial Sequence
  Synthetic Sequence
ggttatattaagtgccgaggaaaaattaggtgcgcttggctcgcgcatta

SEQ ID NO: 423 - DNA, 50 bp, Artificial Sequence; identical to SEQ ID NO: 338
  Synthetic Sequence

SEQ ID NO: 424 - DNA, 50 bp, Artificial Sequence; identical to SEQ ID NO: 337
  Synthetic Sequence

SEQ ID NO: 425 - DNA, 74 bp, Artificial Sequence
  Synthetic Sequence
tcagtcctcatctccctcaagcaggccccgctggtgcactgaagagccaccctgtggaaacactacatctgcaa

SEQ ID NO: 426 - DNA, 74 bp, Artificial Sequence
  Synthetic Sequence
ttgcagatgtagtgtttccacagggtggctcttcagtgcaccagcggggcctgcttgagggagatgaggactga

SEQ ID NO: 427 - DNA, 20 bp, Artificial Sequence
  Synthetic Sequence
tgtggaaacactacatctgc

SEQ ID NO: 428 - RNA, 62 nt, Artificial Sequence
  Synthetic Sequence
gcagauguaguguuuccacaguuuuagagcuagaaauagcaaguuaaaauaaggcuaguccg

SEQ ID NO: 429 - RNA, 75 nt, Artificial Sequence
  Synthetic Sequence
gcagauguaguguuuccacaguuuuagagcuaugcugaaaagcauagcaaguuaaaauaaggcuaguccguuauc

SEQ ID NO: 430 - RNA, 87 nt, Artificial Sequence
  Synthetic Sequence
gcagauguaguguuuccacaguuuuagagcuaugcuguuuuggaaacaaaacagcauagcaaguuaaaauaaggcuaguccguuauc

SEQ ID NO: 431 - RNA, 86 nt, Artificial Sequence
  Synthetic Sequence
ggaaccauucaaaacagcauagcaaguuaaaauaaggcuaguccguuaucaacuugaaaaaguggcaccgagucggugcuuuuuuu

SEQ ID NO: 432 - RNA, 67 nt, Artificial Sequence; identical to SEQ ID NO: 392
  Synthetic Sequence

SEQ ID NO: 433 - RNA, 88 nt, Streptococcus pyogenes
guuggaaccauucaaaacagcauagcaaguuaaaauaaggcuaguccguuaucaacuugaaaaaguggcaccgagucggugcuuuuuu

SEQ ID NO: 434 - RNA, 93 nt, Listeria innocua
auauuguuaguauucaaaauaacauagcaaguuaaaauaaggcuuuguccguuaucaacuuuuaauuaaguagcgcuguuucggcgcuuuuuu

SEQ ID NO: 435 - RNA, 104 nt, Streptococcus mutans
uguuggaaucauucgaaacaacacagcaaguuaaaauaaggcagugauuuuuaauccaguccguacacaacuugaaaaagugcgcaccgauucggugcuuuuuu

SEQ ID NO: 436 - RNA, 95 nt, Streptococcus thermophilus
uugugguuugaaaccauucgaaacaacacagcgaguuaaaauaaggcuuaguccguacucaacuugaaaagguggcaccgauucgguguuuuuuu

SEQ ID NO: 437 - RNA, 118 nt, Streptococcus thermophilus
uaauaauaguguaagggacgccuuacacaguuacuuaaaucuugcagaagcuacaaagauaaggcuucaugccgaaaucaacacccugucauuuuauggcaggguguuuucguuauuu

SEQ ID NO: 438 - RNA, 112 nt, Neisseria meningitidis
cauauugucgcacugcgaaaugagaaccguugcuacaauaaggccgucugaaaagaugugccgcaacgcucugccccuuaaagcuucugcuuuaaggggcaucguuuauuuc

SEQ ID NO: 439 - RNA, 110 nt, Pasteurella multocida
gcauauuguugcacugcgaaaugagagacguugcuacaauaaggcuucugaaaagaaugaccguaacgcucugccccuugugauucuuaauugcaaggggcaucguuuuu

SEQ ID NO: 440 - RNA, 115 nt, Mycoplasma mobile
uauuauguauuucgaaauacagauguacaguuaagaauacauaagaaugauacaucacuaaaaaaaggcuuuaugccguaacuacuacuuauuuucaaaauaaguaguuuuuuuu

SEQ ID NO: 441 - RNA, 26 nt, Artificial Sequence
  Synthetic Sequence
uagcaaguuaaaauaaggcuaguccg

SEQ ID NO: 442 - RNA, 36 nt, Streptococcus pyogenes
uuguuggaaccauucaaaacagcauagcaaguuaaa

SEQ ID NO: 443 - RNA, 36 nt, Streptococcus mutans
guguuggaaucauucgaaacaacacagcaaguuaaa

SEQ ID NO: 444 - RNA, 36 nt, Streptococcus thermophilus
gguuugaaaccauucgaaacaacacagcgaguuaaa

SEQ ID NO: 445 - RNA, 36 nt, Streptococcus thermophilus
cuuacacaguuacuuaaaucuugcagaagcuacaaa

SEQ ID NO: 446 - RNA, 36 nt, Listeria innocua
auauuguuaguauucaaaauaacauagcaaguuaaa

SEQ ID NO: 447 - RNA, 34 nt, Listeria innocua
auuguuaguauucaaaauaacauagcaaguuaaa

SEQ ID NO: 448 - RNA, 36 nt, Treponema denticola
auuuaagauccaucuuaaauuacacaacgaguucaa

SEQ ID NO: 449 - RNA, 36 nt, Neisseria meningitidis
auugucgcacugcgaaaugagaaccguugcuacaau

SEQ ID NO: 450 - RNA, 38 nt, Neisseria meningitidis
auauugucgcacugcgaaaugagaaccguugcuacaau

SEQ ID NO: 451 - RNA, 36 nt, Streptococcus gordonii; identical to SEQ ID NO: 445

SEQ ID NO: 452 - RNA, 36 nt, Bifidobacterium bifidum
augaucaaggucauugaccugacaggcauaaauuga

SEQ ID NO: 453 - RNA, 36 nt, Lactobacillus salivarius
gguuuugaccucauugauuuaacauucugaguugaa

SEQ ID NO: 454 - RNA, 37 nt, Francisella tularensis
guuucaguuguuagauuauuugguauguacuuguguu

SEQ ID NO: 455 - RNA, 37 nt, Francisella tularensis
auuacagagcauuaauuauuugguacauuuauaauuu

SEQ ID NO: 456 - RNA, 37 nt, Legionella pneumophila
auuucaggguaucgaaauuuagaugauuucuaauuua

SEQ ID NO: 457 - RNA, 36 nt, Nitratifractor salsuginis
uguaacaggguaggguuuuuugaggggucuuaaaau

SEQ ID NO: 458 - RNA, 36 nt, Butyrivibrio fibrisolvens
aguuucuaaucacuuaauuuuuucggaccuacuaaa

SEQ ID NO: 459 - RNA, 36 nt, Streptobacillus moniliformis
gauucacauuauucaaguuuacuacagauucuguau

SEQ ID NO: 460 - RNA, 36 nt, Mycoplasma mobile
aguuaagaauacauaagaaugauacaucacuaaaaa

SEQ ID NO: 461 - RNA, 44 nt, Capnocytophaga ochracea
auugugaauugcuuucaaauugugcgacaaaaguagguauaaua

SEQ ID NO: 462 - RNA, 36 nt, Acidovorax ebreus
auugcagcaacggcucucaccccggauaaccacaau

SEQ ID NO: 463 - RNA, 36 nt, Wolinella succinogenes
auagccgcugccuacucagccauuuagcgcagcgac

SEQ ID NO: 464 - RNA, 37 nt, Wolinella succinogenes
uuuguuaaagcuggaugggauuauuauagaguguugc

SEQ ID NO: 465 - RNA, 37 nt, Wolinella succinogenes
uuucaaggcaucgaacggauuugcuauaaaguguugc

SEQ ID NO: 466 - RNA, 36 nt, Prevotella ruminicola
uuuugcacacguaagauuccuacaucuuaucacaau

SEQ ID NO: 467 - RNA, 48 nt, Fibrobacter succinogenes
auugugaauugcuuucagauuaugaaaauaauauaguuaaaauuuuug

SEQ ID NO: 468 - RNA, 36 nt, Campylobacter jejuni
auuuuauuucgauuuuaaucaacccuaaauuucaau

SEQ ID NO: 469 - RNA, 36 nt, Campylobacter jejuni
auuuuagucccuuuuuaaauuucuuaugagauuaua

SEQ ID NO: 470 - RNA, 25 nt, Campylobacter jejuni
aagaaauuuaaaaagggacuaaaau

SEQ ID NO: 471 - RNA, 36 nt, Pasteurella multocida
auuguagcaacgucucucauuucgcagugcaacaau

SEQ ID NO: 472 - RNA, 36 nt, Rhodopseudomonas palustris
gccguggcuuuccuaccgauuucccaccgcaugauu

SEQ ID NO: 473 - RNA, 36 nt, Olsenella uli
ucugaauuaccagucagaacgauacugcgagucaaa

SEQ ID NO: 474 - RNA, 36 nt, Rhodospirillum rubrum
guuccauggccccgucccacacgccaugauagagcg

SEQ ID NO: 475 - RNA, 36 nt, Rhodospirillum rubrum
aaacgggagaaccgucccacacggccaugguagagu

SEQ ID NO: 476 - RNA, 36 nt, Dinoroseobacter shibae
uuaacggcucgaccgcgaauucugaacguaaagaca

SEQ ID NO: 477 - RNA, 36 nt, Verminephrobacter eiseniae
uuagcguccagagcgcauaucccagugagauauccg

SEQ ID NO: 478 - RNA, 75 nt, Streptococcus pyogenes
aaacagcauagcaaguuaaaauaaggcuaguccguuaucaacuugaaaaaguggcaccgagucggugcuuuuuuu

SEQ ID NO: 479 - RNA, 77 nt, Listeria innocua
aaauaacauagcaaguuaaaauaaggcuuuguccguuaucaacuuuuaauuaaguagcgcuguuucggcgcuuuuuu

SEQ ID NO: 480 - RNA, 73 nt, Artificial Sequence
  Synthetic Sequence
aacagcauagcaaguuaaaauaaggcuaguccguuaucaacuugaaaaaguggcaccgagucggugcuuuuuu

SEQ ID NO: 481 - RNA, 33 nt, Francisella novicida
uauaaauguaccaaauaauuaaugcucuguaau

SEQ ID NO: 482 - RNA, 74 nt, Campylobacter jejuni
aagaaauuuaaaaagggacuaaaauaaagaguuugcgggacucugcgggguuacaauccccuaaaaccgcuuuu

SEQ ID NO: 483 - RNA, 96 nt, Francisella novicida
aucuaaaauuauaaauguaccaaauaauuaaugcucuguaaucauuuaaaaguauuuugaacggaccucuguuugacacgucugaauaacuaaaaa

SEQ ID NO: 484 - RNA, 109 nt, Streptococcus thermophilus2
uguaagggacgccuuacacaguuacuuaaaucuugcagaagcuacaaagauaaggcuucaugccgaaaucaacacccugucauuuuauggcaggguguuuucguuauuu

SEQ ID NO: 485 - RNA, 110 nt, Mycoplasma mobile
uguauuucgaaauacagauguacaguuaagaauacauaagaaugauacaucacuaaaaaaaggcuuuaugccguaacuacuacuuauuuucaaaauaaguaguuuuuuuu

SEQ ID NO: 486 - RNA, 92 nt, Listeria innocua
auuguuaguauucaaaauaacauagcaaguuaaaauaaggcuuuguccguuaucaacuuuuaauuaaguagcgcuguuucggcgcuuuuuuu

SEQ ID NO: 487 - RNA, 89 nt, Streptococcus pyogenes; identical to SEQ ID NO: 390

SEQ ID NO: 488 - RNA, 107 nt, Streptococcus mutans
guuggaaucauucgaaacaacacagcaaguuaaaauaaggcagugauuuuuaauccaguccguacacaacuugaaaaagugcgcaccgauucggugcuuuuuuauuu

SEQ ID NO: 489 - RNA, 96 nt, Streptococcus thermophilus
uugugguuugaaaccauucgaaacaacacagcgaguuaaaauaaggcuuaguccguacucaacuugaaaagguggcaccgauucgguguuuuuuuu

SEQ ID NO: 490 - RNA, 102 nt, Neisseria meningitidis
acauauugucgcacugcgaaaugagaaccguugcuacaauaaggccgucugaaaagaugugccgcaacgcucugccccuuaaagcuucugcuuuaaggggca

SEQ ID NO: 491 - RNA, 110 nt, Pasteurella multocida; identical to SEQ ID NO: 439

SEQ ID NO: 492 - RNA, 37 nt, Francisella novicida
aacacaaguacauaccaaauaaucuaacaacugaaac

SEQ ID NO: 493 - RNA, 37 nt, Francisella novicida
aaauuauaaauguaccaaauaauuaaugcucuguaau

SEQ ID NO: 494 - RNA, 37 nt, Wolinella succinogenes; identical to SEQ ID NO: 465

SEQ ID NO: 495 - RNA, 37 nt, Wolinella succinogenes; identical to SEQ ID NO: 464

SEQ ID NO: 496 - RNA, 37 nt, gamma proteobacterium
auuucaguguauagaauguugggaugcauucugaaua

SEQ ID NO: 497 - RNA, 37 nt, gamma proteobacterium
auaacaagggaguauuugcuggaauaagcucugaaac

SEQ ID NO: 498 - RNA, 37 nt, Sutterella wadsworthensis
guuuccaagcaauagcucguggcguuaugauuucugu

SEQ ID NO: 499 - RNA, 37 nt, Sutterella wadsworthensis
ggugauuuccuauagcucauagcguuaugaucucuaa

SEQ ID NO: 500 - RNA, 37 nt, Legionella pneumophila; identical to SEQ ID NO: 456

SEQ ID NO: 501 - RNA, 36 nt, Listeria innocua; identical to SEQ ID NO: 446

SEQ ID NO: 502 - RNA, 36 nt, Streptococcus thermophilus; identical to SEQ ID NO: 444

SEQ ID NO: 503 - RNA, 36 nt, Streptococcus mutans; identical to SEQ ID NO: 443

SEQ ID NO: 504 - RNA, 36 nt, Streptococcus pyogenes; identical to SEQ ID NO: 442

SEQ ID NO: 505 - RNA, 36 nt, Fusobacterium nucleatum
auuuuuaauuuaaguaauaaaaaauggagcauauac

SEQ ID NO: 506 - RNA, 36 nt, Filifactor alocis
aguugacuaccauaugagauuacacuacacgguuca

SEQ ID NO: 507 - RNA, 36 nt, Treponema denticola; identical to SEQ ID NO: 448

SEQ ID NO: 508 - RNA, 36 nt, Solobacterium moorei
cuuauaccaguaagauaauuuacauaguaaguucaa

SEQ ID NO: 509 - RNA, 36 nt, Veillonella atypica
guuuuggagguuuacagaauuacacuacgaguucaa

SEQ ID NO: 510 - RNA, 36 nt, Finegoldia magna
guuuaauaccuauaugagauuacaucaugaguucaa

SEQ ID NO: 511 - RNA, 36 nt, Olsenella uli; identical to SEQ ID NO: 473

SEQ ID NO: 512 - RNA, 36 nt, Lactobacillus rhamnosus
caacuugaauugauugaucugacaucuacgaguuga

SEQ ID NO: 513 - RNA, 36 nt, Lactobacillus gasseri
ugauuagauuucauugaucuaacagccaucuaaaac

SEQ ID NO: 514 - RNA, 36 nt, Lactobacillus gasseri
acacuaaacuuuauugaucuaacaaccagauuuaaa

SEQ ID NO: 515 - RNA, 36 nt, Oenococcus kitaharae
ggguucuaccucauugaucugacacacagcauugaa

SEQ ID NO: 516 - RNA, 36 nt, Bifidobacterium bifidum; identical to SEQ ID NO: 452

SEQ ID NO: 517 - RNA, 36 nt, Staphylococcus pseudintermedius
guuuuacuucuuucuaaauaaacauaguuaaguuaa

SEQ ID NO: 518 - RNA, 36 nt, Eubacterium rectale
auuuuauagucacguaaauuuuucagaucuacuaaa

SEQ ID NO: 519 - RNA, 38 nt, Enterococcus faecalis
auuuuacugauaagaaauuauugagaaucuacaaaaau

SEQ ID NO: 520 - RNA, 36 nt, Streptococcus thermophilus; identical to SEQ ID NO: 445

SEQ ID NO: 521 - RNA, 36 nt, Staphylococcus lugdunensis
cuuguacuuauaccuaaaauuacagaaucuacugaa

SEQ ID NO: 522 - RNA, 36 nt, Eubacterium dolichum
aucauaaucuagcaaaaguuuauaugaucuaacaaa

SEQ ID NO: 523 - RNA, 36 nt, Mycoplasma mobile; identical to SEQ ID NO: 460

SEQ ID NO: 524 - RNA, 36 nt, Mycoplasma ovipneumoniae
auuuuacucuaguaagaaauugucgcacaaaaauaa

SEQ ID NO: 525 - RNA, 36 nt, Mycoplasma gallisepticum
auuauugcuuacacaauuauugucgugcuaaaauaa

SEQ ID NO: 526 - RNA, 36 nt, Mycoplasma canis
auuauuguuuacccaaauauuguacauccuaaauca

SEQ ID NO: 527 - RNA, 36 nt, Mycoplasma synoviae
uacuuacuuaacaaaauaauuguacgauuccaaaau

SEQ ID NO: 528 - RNA, 36 nt, Aminomonas paucivorans
gccuucccucccugccgaaggagcagauccucuccu

SEQ ID NO: 529 - RNA, 36 nt, Clostridium perfringens
uuauaguaacuaguuaaacucucgauaugcuauacc

SEQ ID NO: 530 - RNA, 36 nt, Clostridium cellulolyticum
auuauagcaacaauucaggcuccgauaugccauaau

SEQ ID NO: 531 - RNA, 36 nt, Acidovorax ebreus; identical to SEQ ID NO: 462

SEQ ID NO: 532 - RNA, 36 nt, Neisseria meningitidis; identical to SEQ ID NO: 449

SEQ ID NO: 533 - RNA, 36 nt, Pasteurella multocida
auuguugcacugcgaaaugagagacguugcuacaau

SEQ ID NO: 534 - RNA, 36 nt, phylotype Rs-D17
uuuguaacuuaucugagagaggaugguuauuauaau

SEQ ID NO: 535 - RNA, 36 nt, Wolinella succinogenes; identical to SEQ ID NO: 463

SEQ ID NO: 536 - RNA, 36 nt, Campylobacter jejuni
auaauacaaaaaucauuuuuuuaaacaaacauaaac

SEQ ID NO: 537 - RNA, 36 nt, Campylobacter jejuni
uauaaucucauaagaaauuuaaaaagggacuaaaau

SEQ ID NO: 538 - RNA, 36 nt, Helicobacter mustelae
guauuugucaauaaauauacuuuauaauggcaagau

SEQ ID NO: 539 - RNA, 36 nt, Roseburia intestinalis
uuguaauaaccuaauuaucacuugguaugauauaau

SEQ ID NO: 540 - RNA, 36 nt, Lactobacillus coryniformis
uuuuauucuauaguaaguuuucagcuaaaauagauc

SEQ ID NO: 541 - RNA, 36 nt, Rhodopseudomonas palustris; identical to SEQ ID NO: 472

SEQ ID NO: 542 - RNA, 36 nt, Cand. Puniceispirillum marinum
uaaccauaggcuccucaaucaccagaguguuauugc

SEQ ID NO: 543 - RNA, 36 nt, Verminephrobacter eiseniae; identical to SEQ ID NO: 477

SEQ ID NO: 544 - RNA, 36 nt, Ralstonia syzygii
guuaguagcaaagcgcaauucccgaucugcuggaaa

SEQ ID NO: 545 - RNA, 36 nt, Azospirillum B510
uuaacggcuggacccccgauccccaucgaauuucca

SEQ ID NO: 546 - RNA, 36 nt, Dinoroseobacter shibae; identical to SEQ ID NO: 476

SEQ ID NO: 547 - RNA, 36 nt, Rhodospirillum rubrum; identical to SEQ ID NO: 474

SEQ ID NO: 548 - RNA, 36 nt, Rhodospirillum rubrum; identical to SEQ ID NO: 475

SEQ ID NO: 549 - RNA, 36 nt, Spirochaeta Buddy
auuagagauaaucgcugguuuuuguuaagauauaac

SEQ ID NO: 550 - RNA, 36 nt, Prevotella ruminicola; identical to SEQ ID NO: 466

SEQ ID NO: 551 - RNA, 36 nt, Flavobacterium columnare
agauaaaauuauucuaaucuuuaaucuuaucacaau

SEQ ID NO: 552 - RNA, 36 nt, Parvibaculum lavamentivorans
cuugcgaaaagcgaccgccucucgauuugcuacaga

SEQ ID NO: 553 - RNA, 44 nt, Capnocytophaga ochracea; identical to SEQ ID NO: 461

SEQ ID NO: 554 - RNA, 48 nt, Fibrobacter succinogenes; identical to SEQ ID NO: 467

SEQ ID NO: 555 - RNA, 36 nt, Nitratifractor salsuginis; identical to SEQ ID NO: 457

SEQ ID NO: 556 - RNA, 36 nt, Akkermansia muciniphila
cuuauacgggaacuccacgauaaggcauuuuacaug

SEQ ID NO: 557 - RNA, 88 nt, Artificial Sequence
  Synthetic Sequence
uuggaaccauucaaaacagcauagcaaguuaaaauaaggcuaguccguuaucaacuugaaaaaguggcaccgagucggugcuuuuuuu

SEQ ID NO: 558 - RNA, 77 nt, Artificial Sequence
  Synthetic Sequence
caaaacagcauagcaaguuaaaauaaggcuaguccguuaucaacuugaaaaaguggcaccgagucggugcuuuuuuu

SEQ ID NO: 559 - RNA, 61 nt, Artificial Sequence
  Synthetic Sequence
caaaacagcauagcaaguuaaaauaaggcuaguccguuaucaacuugaaaaaguuuuuuuu

SEQ ID NO: 560 - RNA, 44 nt, Artificial Sequence
  Synthetic Sequence
caaaacagcauagcaaguuaaaauaaggcuaguccguuuuuuuu

SEQ ID NO: 561 - RNA, 72 nt, Artificial Sequence
  Synthetic Sequence
caaaacagcauagcaaguuaaaauaaggcuaguccgguucacugccguauaggcagcuaagaaauuuuuuuu

SEQ ID NO: 562 - RNA, 14 nt, Artificial Sequence
  Synthetic Sequence
uagcaaguuaaaau

SEQ ID NO: 563 - RNA, 102 nt, Artificial Sequence
  Synthetic Sequence
  misc_feature (1)..(80): n is a, c, g, or u
nnnnnnnnnnnnnnnnnnnnnnnnnnnnnnnnnnnnnnnnnnnnnnnnnnnnnnnnnnnnnnnnnnnnnnnnnnnnnnnnguuuuagagcuaugcuguuuug

SEQ ID NO: 564 - RNA, 102 nt, Artificial Sequence
  Synthetic Sequence
  misc_feature (1)..(80): n is a, c, g, or u
nnnnnnnnnnnnnnnnnnnnnnnnnnnnnnnnnnnnnnnnnnnnnnnnnnnnnnnnnnnnnnnnnnnnnnnnnnnnnnnnguuuuagagcuauguuauuuug

SEQ ID NO: 565 - RNA, 92 nt, exemplary
  misc_feature (1)..(80): n is a, c, g, or u
nnnnnnnnnnnnnnnnnnnnnnnnnnnnnnnnnnnnnnnnnnnnnnnnnnnnnnnnnnnnnnnnnnnnnnnnnnnnnnnnguuuuagagcua

SEQ ID NO: 566 - RNA, 152 nt, Artificial Sequence
  Synthetic Sequence
  misc_feature (37)..(116): n is a, c, g, or u
guuuuagagcuaugcuguuuugaauggucccaaaacnnnnnnnnnnnnnnnnnnnnnnnnnnnnnnnnnnnnnnnnnnnnnnnnnnnnnnnnnnnnnnnnnnnnnnnnnnnnnnnnguuuuagagcuaugcuguuuugaauggucccaaaac

SEQ ID NO: 567 - RNA, 188 nt, Artificial Sequence
  Synthetic Sequence
  misc_feature (37)..(116): n is a, c, g, or u
guuuuagagcuaugcuguuuugaauggucccaaaacnnnnnnnnnnnnnnnnnnnnnnnnnnnnnnnnnnnnnnnnnnnnnnnnnnnnnnnnnnnnnnnnnnnnnnnnnnnnnnnnguuuuagagcuaugcuguuuugaauggucccaaaacguuuuagagcuaugcuguuuugaauggucccaaaac

SEQ ID NO: 568 - RNA, 22 nt, exemplary
guuuuagagcuaugcuguuuug

SEQ ID NO: 569 - RNA, 36 nt, Streptococcus pyogenes
guuuuagagcuaugcuguuuugaauggucccaaaac

SEQ ID NO: 570 - RNA, 36 nt, Pasteurella multocida
guuguaguucccucucucauuucgcagugcuacaau

SEQ ID NO: 571 - RNA, 36 nt, Mycoplasma mobile
guuuugguguaguaucauucuuauguauucuuaaac

SEQ ID NO: 572 - RNA, 37 nt, Francisella novicida
guuucaguugcugaauuauuugguaaacuacuguuag

SEQ ID NO: 573 - RNA, 33 nt, Francisella novicida
guuucaguugcugaauuauuugguaaacuacug

SEQ ID NO: 574 - RNA, 36 nt, Streptococcus mutans
guuuuagagcuguguuguuucgaaugguuccaaaac

SEQ ID NO: 575 - RNA, 36 nt, Streptococcus thermophilus; identical to SEQ ID NO: 574

SEQ ID NO: 576 - RNA, 36 nt, Streptococcus thermophilus
guuuuuguacucucaagauuuaaguaacuguacaac

SEQ ID NO: 577 - RNA, 36 nt, Listeria innocua
guuuuagagcuauguuauuuugaaugcuaacaaaac

SEQ ID NO: 578 - RNA, 36 nt, Treponema denticola
guuugagaguuguguaauuuaagauggaucucaaac

SEQ ID NO: 579 - RNA, 36 nt, Neisseria meningitidis
guuguagcucccuuucucauuucgcagugcuacaau

SEQ ID NO: 580 - RNA, 36 nt, Streptococcus gordonii; identical to SEQ ID NO: 576

SEQ ID NO: 581 - RNA, 35 nt, Bifidobacterium bifidum
guuucaaugccugucagaucaaugacuuugaccac

SEQ ID NO: 582 - RNA, 36 nt, Lactobacillus salivarius
guuucagaaguauguuaaaucaauaagguuaagacc

SEQ ID NO: 583 - RNA, 37 nt, Francisella novicida
cuaacaguaguuuaccaaauaauucagcaacugaaac

SEQ ID NO: 584 - RNA, 37 nt, Francisella novicida; identical to SEQ ID NO: 583

SEQ ID NO: 585 - RNA, 37 nt, Legionella pneumophila
ccaauaaucccucaucuaaaaauccaaccacugaaac

SEQ ID NO: 586 - RNA, 36 nt, Nitratifractor salsuginis
guuuuaagaccccucaaaaccccacccuguuacaau

SEQ ID NO: 587 - RNA, 36 nt, Butyrivibrio fibrisolvens
guuuuaguacccgggaaaauuaagugauuggaaaac

SEQ ID NO: 588 - RNA, 36 nt, Streptobacillus moniliformis
gauacagauucuugguaaauuugaauaaugugaaug

SEQ ID NO: 589 - RNA, 36 nt, Mycoplasma mobile; identical to SEQ ID NO: 571

SEQ ID NO: 590 - RNA, 44 nt, Capnocytophaga ochracea
uguuaucaaucgcaaaacuacaaaauuugaaagcaauucacaac

SEQ ID NO: 591 - RNA, 36 nt, Acidovorax ebreus
aguguagcuauccggggugagagagggagcuacaac

SEQ ID NO: 592 - RNA, 36 nt, Wolinella succinogenes
auuauagcgaggaauggcugaguaggcggcuauaac

SEQ ID NO: 593 - RNA, 37 nt, Wolinella succinogenes
gcaacacuuuauagcaaauccgcuuagccugugaaac

SEQ ID NO: 594 - RNA, 37 nt, Wolinella succinogenes; identical to SEQ ID NO: 593

SEQ ID NO: 595 - RNA, 36 nt, Prevotella ruminicola
guugugguuugauguaggaaaggaaugauauacaac

SEQ ID NO: 596 - RNA, 48 nt, Fibrobacter succinogenes
guuguuauugcacuaguaaaacuagaaaaucugaaagcaauucacaac

SEQ ID NO: 597 - RNA, 36 nt, Campylobacter jejuni
auuuuaccauaaagaaauuuaaaaagggacuaaaac

SEQ ID NO: 598 - RNA, 36 nt, Campylobacter jejuni
guuuuagucccuuuuuaaauuucuuuaugguaaaau

SEQ ID NO: 599 - RNA, 36 nt, Pasteurella multocida
auuguagcacugcgaaaugagagagggaacuacaac

SEQ ID NO: 600 - RNA, 36 nt, Rhodopseudomonas palustris
agccuaccacggggaaaucgguagggaagccacggc

SEQ ID NO: 601 - RNA, 36 nt, Olsenella uli
guuuuggggcagugucguuuugacugguaaucaaac

SEQ ID NO: 602 - RNA, 36 nt, Rhodospirillum rubrum
acucuaccauggcggugugggacggggccauggaac

SEQ ID NO: 603 - RNA, 36 nt, Rhodospirillum rubrum; identical to SEQ ID NO: 602

SEQ ID NO: 604 - RNA, 36 nt, Dinoroseobacter shibae
aguuuagcuguucagaauucgggguccagccgcaac

SEQ ID NO: 605 - RNA, 36 nt, Verminephrobacter eiseniae
auuguagcucacugggauaugcgcacuggccggaac

SEQ ID NO: 606 - RNA, 37 nt, Francisella novicida; identical to SEQ ID NO: 572

SEQ ID NO: 607 - RNA, 37 nt, Francisella novicida; identical to SEQ ID NO: 572

SEQ ID NO: 608 - RNA, 37 nt, Wolinella succinogenes; identical to SEQ ID NO: 593

SEQ ID NO: 609 - RNA, 37 nt, Wolinella succinogenes; identical to SEQ ID NO: 593

SEQ ID NO: 610 - RNA, 37 nt, gamma proteobacterium
guuucagagcuuaucccaacaaaccaacagcugaaac

SEQ ID NO: 611 - RNA, 37 nt, gamma proteobacterium; identical to SEQ ID NO: 610

SEQ ID NO: 612 - RNA, 37 nt, Sutterella wadsworthensis
gcgaagaucauaacgcuacgagcuauagcacugaaac

SEQ ID NO: 613 - RNA, 37 nt, Sutterella wadsworthensis; identical to SEQ ID NO: 612

SEQ ID NO: 614 - RNA, 37 nt, Legionella pneumophila; identical to SEQ ID NO: 585

SEQ ID NO: 615 - RNA, 36 nt, Listeria innocua; identical to SEQ ID NO: 577

SEQ ID NO: 616 - RNA, 36 nt, Streptococcus thermophilus; identical to SEQ ID NO: 574

SEQ ID NO: 617 - RNA, 36 nt, Streptococcus mutans; identical to SEQ ID NO: 574

SEQ ID NO: 618 - RNA, 36 nt, Streptococcus pyogenes; identical to SEQ ID NO: 569

SEQ ID NO: 619 - RNA, 36 nt, Fusobacterium nucleatum
guuugagaguaauguuauuuuaaauagauucaaaac

SEQ ID NO: 620 - RNA, 36 nt, Filifactor alocis
guuugagaguaguguaauuucauaugguagucaaac

SEQ ID NO: 621 - RNA, 36 nt, Treponema denticola; identical to SEQ ID NO: 578

SEQ ID NO: 622 - RNA, 36 nt, Solobacterium moorei
guuugagaacuauguaaauuaugcugguagcaaaac

SEQ ID NO: 623 - RNA, 36 nt, Veillonella atypica
guuugcgaguaguguaauucuguaaaucucuaaaac

SEQ ID NO: 624 - RNA, 36 nt, Finegoldia magna
guuugagaaugauguaauuucauauagguauuaaac

SEQ ID NO: 625 - RNA, 36 nt, Olsenella uli; identical to SEQ ID NO: 601

SEQ ID NO: 626 - RNA, 36 nt, Lactobacillus rhamnosus
gucucagguagaugucagaucaaucaguucaagagc

SEQ ID NO: 627 - RNA, 36 nt, Lactobacillus gasseri
guuuuagaugguuguuagaucaauaagguuuagauc

SEQ ID NO: 628 - RNA, 36 nt, Lactobacillus gasseri; identical to SEQ ID NO: 627

SEQ ID NO: 629 - RNA, 36 nt, Oenococcus kitaharae
gcuucagaugugugucagaucaaugagguagaaccc

SEQ ID NO: 630 - RNA, 36 nt, Bifidobacterium bifidum
guuucagaugccugucagaucaaugacuuugaccac

SEQ ID NO: 631 - RNA, 36 nt, Staphylococcus pseudintermedius
guuuuagcacuauguuuauuuagaaagagguaaaac

SEQ ID NO: 632 - RNA, 36 nt, Eubacterium rectale
auuuuaguaacugaauaauuuacgugacuguaaaac

SEQ ID NO: 633 - RNA, 36 nt, Enterococcus faecalis
guuuuuguauucucaauaauuucuuaucaguaaaac

SEQ ID NO: 634 - RNA, 36 nt, Streptococcus thermophilus; identical to SEQ ID NO: 576

SEQ ID NO: 635 - RNA, 36 nt, Staphylococcus lugdunensis
guuuuaguacucuguaauuuuagguauaagugauac

SEQ ID NO: 636 - RNA, 36 nt, Eubacterium dolichum
guuuuguuaccauauggauuuuugcuagauuaagac

SEQ ID NO: 637 - RNA, 36 nt, Mycoplasma mobile; identical to SEQ ID NO: 571

SEQ ID NO: 638 - RNA, 36 nt, Mycoplasma ovipneumoniae
guuuuugugcuguacaauuucuuacuagaguaaaac

SEQ ID NO: 639 - RNA, 36 nt, Mycoplasma gallisepticum
guuuuagcacuguacaauacuuguguaagcaauaac

SEQ ID NO: 640 - RNA, 36 nt, Mycoplasma canis
guuuuaguguuguacaauauuuggguaaacaauaac

SEQ ID NO: 641 - RNA, 36 nt, Mycoplasma synoviae
guuuugggguuguacaauuauuuuguuaaguaaaac

SEQ ID NO: 642 - RNA, 36 nt, Aminomonas paucivorans
agcauagcauuucggagugcggcagggagcuaugac

SEQ ID NO: 643 - RNA, 36 nt, Clostridium perfringens
auuauagcauaucgagaauuuacuaggaacuauaac

SEQ ID NO: 644 - RNA, 36 nt, Clostridium cellulolyticum
auuauagcauaucggagccugaauuggagcuauaac

SEQ ID NO: 645 - RNA, 36 nt, Acidovorax ebreus; identical to SEQ ID NO: 591

SEQ ID NO: 646 - RNA, 36 nt, Neisseria meningitidis; identical to SEQ ID NO: 579

SEQ ID NO: 647 - RNA, 36 nt, Pasteurella multocida; identical to SEQ ID NO: 570

SEQ ID NO: 648 - RNA, 36 nt, phylotype Rs-D17
guuauaguuuccuuccucucucagaugugcuauaau

SEQ ID NO: 649 - RNA, 36 nt, Wolinella succinogenes; identical to SEQ ID NO: 592

SEQ ID NO: 650 - RNA, 36 nt, Campylobacter jejuni; identical to SEQ ID NO: 598

SEQ ID NO: 651 - RNA, 36 nt, Campylobacter jejuni; identical to SEQ ID NO: 598

SEQ ID NO: 652 - RNA, 36 nt, Helicobacter mustelae
auuuuagcauaaacauauuuaugaaguggcuaaaac

SEQ ID NO: 653 - RNA, 36 nt, Roseburia intestinalis
auuauaccauaccaagugauaacagggaauuacaac

SEQ ID NO: 654 - RNA, 36 nt, Lactobacillus coryniformis
gaucuauuuuagcugaaaacugaaggaaucaauagc

SEQ ID NO: 655 - RNA, 36 nt, Rhodopseudomonas palustris; identical to SEQ ID NO: 600

SEQ ID NO: 656 - RNA, 36 nt, Cand. Puniceispirillum marinum
aguauagcacucuggugauugagagccuagagcaac

SEQ ID NO: 657 - RNA, 36 nt, Verminephrobacter eiseniae; identical to SEQ ID NO: 605

SEQ ID NO: 658 - RNA, 36 nt, Ralstonia syzygii
agguuagcagaucgggaauugcgcucuggcuacaac

SEQ ID NO: 659 - RNA, 36 nt, Azospirillum B510
aguguagccgauggggaucggggguccagccgcaac

SEQ ID NO: 660 - RNA, 36 nt, Dinoroseobacter shibae; identical to SEQ ID NO: 604

SEQ ID NO: 661 - RNA, 36 nt, Rhodospirillum rubrum; identical to SEQ ID NO: 602

SEQ ID NO: 662 - RNA, 36 nt, Rhodospirillum rubrum; identical to SEQ ID NO: 602

SEQ ID NO: 663 - RNA, 36 nt, Spirochaeta Buddy
ggucaaucuuaacaaaaaucagcggucauccccaac

SEQ ID NO: 664 - RNA, 36 nt, Prevotella ruminicola; identical to SEQ ID NO: 595

SEQ ID NO: 665 - RNA, 36 nt, Flavobacterium columnare
guugugguuugauuaaagauuagaaaacacgauauu

SEQ ID NO: 666 - RNA, 36 nt, Parvibaculum lavamentivorans
agaguagcaaaucgagagacggccgcaauccgcagc

SEQ ID NO: 667 - RNA, 44 nt, Capnocytophaga ochracea; identical to SEQ ID NO: 590

SEQ ID NO: 668 - RNA, 48 nt, Fibrobacter succinogenes; identical to SEQ ID NO: 596

SEQ ID NO: 669 - RNA, 36 nt, Nitratifractor salsuginis; identical to SEQ ID NO: 586

SEQ ID NO: 670 - RNA, 36 nt, Akkermansia muciniphila
guuguacugugccuuauuuuggauucaaggcaaaac

SEQ ID NO: 671 - RNA, 44 nt, Artificial Sequence
  Synthetic Sequence
guuuuagagcuagaaauagcaaguuaaaauaaggcuaguccguu

SEQ ID NO: 672 - RNA, 60 nt, Artificial Sequence
  Synthetic Sequence
  misc_feature (13)..(17): n is a, c, g, or u
guuuuagagcuannnnnuagcaaguuaaaauaaguuaaaauaaggcuaguccguuaucaa

SEQ ID NO: 673 - RNA, 68 nt, Artificial Sequence
  Synthetic Sequence
guuuuagagcuaugcugaaaagcauagcaaguuaaaaauaaguuaaaauaaggcuaguccguuaucaa

SEQ ID NO: 674 - RNA, 69 nt, Artificial Sequence
  Synthetic Sequence
guuuuagagcuaugcuguuuuggaaacaaaacagcauagcaaguuaaaauaaggcuaguccguuaucaa

SEQ ID NO: 675 - RNA, 70 nt, Artificial Sequence
  Synthetic Sequence
guuuuagagcuaguuuuagagcuagaaauagcaaguuaaaauuagcaaguuaaaauaaggcuaguccguu

SEQ ID NO: 676 - RNA, 70 nt, Artificial Sequence
  Synthetic Sequence
guuuuagagcuauagcaaguuaaaaugaaaguuuuagagcuauagcaaguuaaaauaaggcuaguccguu

SEQ ID NO: 677 - RNA, 74 nt, Artificial Sequence
  Synthetic Sequence
guuuuagagcuagaaauagcaaguuaaaauguuuuagagcuagaaauagcaaguuaaaauaaggcuaguccguu

SEQ ID NO: 678 - RNA, 119 nt, Artificial Sequence
  Synthetic Sequence
guuuuagagcuaugcuguuuuggaaacaaaacagcauagcaaguuaaaauguuuuagagcuaugcuguuuuggaaacaaaacagcauagcaaguuaaaauaaggcuaguccguuaucaa

SEQ ID NO: 679 - RNA, 12 nt, Artificial Sequence
  Synthetic Sequence
guuuuagagcua

SEQ ID NO: 680 - RNA, 218 nt, Artificial Sequence
  Synthetic Sequence
  misc_feature (1)..(80): n is a, c, g, or u
  misc_feature (93)..(192): n is a, c, g, or u
nnnnnnnnnnnnnnnnnnnnnnnnnnnnnnnnnnnnnnnnnnnnnnnnnnnnnnnnnnnnnnnnnnnnnnnnnnnnnnnnguuuuagagcuannnnnnnnnnnnnnnnnnnnnnnnnnnnnnnnnnnnnnnnnnnnnnnnnnnnnnnnnnnnnnnnnnnnnnnnnnnnnnnnnnnnnnnnnnnnnnnnnnnnuagcaaguuaaaauaaggcuaguccg

SEQ ID NO: 681 - RNA, 219 nt, Artificial Sequence
  Synthetic Sequence
  misc_feature (1)..(80): n is a, c, g, or u
  misc_feature (93)..(192): n is a, c, g, or u
nnnnnnnnnnnnnnnnnnnnnnnnnnnnnnnnnnnnnnnnnnnnnnnnnnnnnnnnnnnnnnnnnnnnnnnnnnnnnnnnguuuuagagcuannnnnnnnnnnnnnnnnnnnnnnnnnnnnnnnnnnnnnnnnnnnnnnnnnnnnnnnnnnnnnnnnnnnnnnnnnnnnnnnnnnnnnnnnnnnnnnnnnnnuagcaaguuaaaauaaggcuuuguccg

SEQ ID NO: 682 - RNA, 163 nt, Artificial Sequence
  Synthetic Sequence
  misc_feature (1)..(80): n is a, c, g, or u
nnnnnnnnnnnnnnnnnnnnnnnnnnnnnnnnnnnnnnnnnnnnnnnnnnnnnnnnnnnnnnnnnnnnnnnnnnnnnnnnguuuuagagcuagaaauagcaaguuaaaauaaggcuaguccguuaucaacuugaaaaaguggcaccgagucggugcuuuuuuu

SEQ ID NO: 683 - RNA, 39 nt, Artificial Sequence
  Synthetic Sequence
aucaacuugaaaaaguggcaccgagucggugcuuuuuuu

SEQ ID NO: 684 - RNA, 33 nt, Artificial Sequence
  Synthetic Sequence
aaaaucaaaggaucuucuugagauccuuuuuuu

SEQ ID NO: 685 - RNA, 34 nt, Artificial Sequence
  Synthetic Sequence
cgccgaaaaccccgcuucggcgggguuuugccgc

SEQ ID NO: 686 - RNA, 34 nt, Artificial Sequence
  Synthetic Sequence
cgcaaaaaaccccgcuucggcgggguuuuuucgc

SEQ ID NO: 687 - RNA, 39 nt, Artificial Sequence
  Synthetic Sequence
aaaaaaaaaccccgccccugacagggcgggguuuuuuuu

SEQ ID NO: 688 - RNA, 40 nt, Artificial Sequence
  Synthetic Sequence
cgcaaaaaaccccgccccugacagggcgggguuuuuucgc

SEQ ID NO: 689 - RNA, 41 nt, Artificial Sequence
  Synthetic Sequence
ucacacuggcucaccuucgggugggccuuucugcguuuaua

SEQ ID NO: 690 - RNA, 46 nt, Artificial Sequence
  Synthetic Sequence
agagaauauaaaaagccagauuauuaauccggcuuuuuuauuauuu

SEQ ID NO: 691 - RNA, 80 nt, Artificial Sequence
  Synthetic Sequence
ccaggcaucaaauaaaacgaaaggcucagucgaaagacugggccuuucguuuuaucuguuguuugucggugaacgcucuc

SEQ ID NO: 692 - RNA, 123 nt, Artificial Sequence
  Synthetic Sequence
aucaaaauuuacggcuuugaaaaaguaauuucgugaccuucgguauaagguuacuacuagauucaggugcucaucagaugcaccacauucucuauaaaaaaaaaugguaucuuucuuauuuga

SEQ ID NO: 693 - RNA, 129 nt, Artificial Sequence
  Synthetic Sequence
ccaggcaucaaauaaaacgaaaggcucagucgaaagacugggccuuucguuuuaucuguuguuugucggugaacgcucucuacuagagucacacuggcucaccuucgggugggccuuucugcguuuaua

SEQ ID NO: 694 - RNA, 129 nt, Artificial Sequence
  Synthetic Sequence
gcaugugcucuguauguauauaaaacucuuguuuucuucuuuucucuaaauauucuuuccuuauacauuaggaccuuugcagcauaaauuacuauacuucuauuacuagagcccgccgccaccauggag

SEQ ID NO: 695 - RNA, 139 nt, Artificial Sequence
  Synthetic Sequence
auuccgauaacuuguuuauugcagcuuauaaugguuacaaauaaagcaauagcaucacaaauuucacaaauaaagcauuuuuuucacugcauucuaguugugguuuguccaaacucaucaauguaucuuaucaugucug

SEQ ID NO: 696 - RNA, 225 nt, Artificial Sequence
  Synthetic Sequence
uaauaagcgaauuucuuaugauuuaugauuuuuauuauuaaauaaguuauaaaaaaaauaaguguauacaaauuuuaaagugacucuuagguuuuaaaacgaaaauucuuauucuugaguaacucuuuccuguaggucagguugcuuucucagguauagcaugaggucgcucuuauugaccacaccucuaccggcaugccgagcaaaugccugcaaaucgcuccc

SEQ ID NO: 697 - RNA, 53 nt, Artificial Sequence
  Synthetic Sequence
aacuuucaguuuagcggucuguuuuagagcuagaaauagcaaguuaaaauaag

SEQ ID NO: 698 - DNA, 31 bp, Artificial Sequence
  Synthetic Sequence
aaggtacccagaccgctaaactgaaagttac

SEQ ID NO: 699 - DNA, 31 bp, Artificial Sequence
  Synthetic Sequence
gtaactttcagtttagcggtctgggtacctt

SEQ ID NO: 700 - DNA, 40 bp, Artificial Sequence
  Synthetic Sequence
agtttttaaaagagcttggcggttgttttagtcccttttt

SEQ ID NO: 701 - DNA, 42 bp, Artificial Sequence
  Synthetic Sequence
caaagtttcattagttgaatttaactgttttagtcccttttt

SEQ ID NO: 702 - DNA, 42 bp, Artificial Sequence
  Synthetic Sequence
aagaatgaggatgatgatattttacagttttagtcccttttt

SEQ ID NO: 703 - DNA, 42 bp, Artificial Sequence
  Synthetic Sequence
gtgtgctaaaaaaaatggacttaaatgttttagtcccttttt

SEQ ID NO: 704 - DNA, 74 bp, Artificial Sequence
  Synthetic Sequence
aagaaatttaaaaagggactaaaataaagagtttgcgggactctgcggggttacaatcccctaaaaccgctttt

SEQ ID NO: 705 - DNA, 54 bp, Artificial Sequence
  Synthetic Sequence
ataactcgaccaatatttgacaaagtttcagttgctgaattatttggtaaacct

SEQ ID NO: 706 - DNA, 58 bp, Artificial Sequence
  Synthetic Sequence
ggcaggttttgtatggtcatataggagtgtttcagttgctgaattatttggtaaacct

SEQ ID NO: 707 - DNA, 69 bp, Artificial Sequence
  Synthetic Sequence
agctatagggttacctatcttttgagtgttggcaaataagtttcagttgctgaattatttggtaaacct

SEQ ID NO: 708 - DNA, 54 bp, Artificial Sequence
  Synthetic Sequence
atgcttttaaactactgatatatacgtttcagttgctgaattatttggtaaact

SEQ ID NO: 709 - DNA, 80 bp, Artificial Sequence
  Synthetic Sequence
gtaccaaataattaatgctctgtaatcatttaaaagtattttgaacggacctctgtttgacacgtctgaataactaaaaa

SEQ ID NO: 710 - DNA, 52 bp, Artificial Sequence
  Synthetic Sequence
tatccattcccagccggaaattaagttgtagctccctttctcatttcgcagt

SEQ ID NO: 711 - DNA, 53 bp, Artificial Sequence
  Synthetic Sequence
gcctttttacaagctcgctttctttgttgtagctccctttctcatttcgcagt

SEQ ID NO: 712 - DNA, 53 bp, Artificial Sequence
  Synthetic Sequence
taaaggtttctgttgcgacccgaatgttgtagctccctttctcatttcgcagt

SEQ ID NO: 713 - DNA, 55 bp, Artificial Sequence
  Synthetic Sequence
taactttgaccgtgtgcaatccagttagttgtagctccctttctcatttcgcagt

SEQ ID NO: 714 - DNA, 52 bp, Artificial Sequence
  Synthetic Sequence
aacccactaaattttgcaaatgcggttgtagctccctttctcatttcgcagt

SEQ ID NO: 715 - DNA, 53 bp, Artificial Sequence
  Synthetic Sequence
tttttttgtactgttgtttgaacgagttgtagctccctttctcatttcgcagt

SEQ ID NO: 716 - DNA, 55 bp, Artificial Sequence
  Synthetic Sequence
ttcgtttcagatagcaaacgcagtagtgttgtagctccctttctcatttcgcagt

SEQ ID NO: 717 - DNA, 84 bp, Artificial Sequence
  Synthetic Sequence
atatgacggtgggcaactggtacaggttgtagctccctttctcatttcgcagtgctacaatgccggatatgacggtgggcaact

SEQ ID NO: 718 - DNA, 52 bp, Artificial Sequence
  Synthetic Sequence
cttttgtattgattcaaggtgcttgttgtagctccctttctcatttcgcagt

SEQ ID NO: 719 - DNA, 55 bp, Artificial Sequence
  Synthetic Sequence
attcgtcgatgatggaaactcgagcatgttgtagctccctttctcatttcgcagt

SEQ ID NO: 720 - DNA, 55 bp, Artificial Sequence
  Synthetic Sequence
tagccagtgctaaaaccgcacccgcttgttgtagctccctttctcatttcgcagt

SEQ ID NO: 721 - DNA, 54 bp, Artificial Sequence
  Synthetic Sequence
atagaaatacatacgccgagtaattagttgtagctccctttctcatttcgcagt

SEQ ID NO: 722 - DNA, 54 bp, Artificial Sequence
  Synthetic Sequence
tttttgtaattgttctgccttttttagttgtagctccctttctcatttcgcagt

SEQ ID NO: 723 - DNA, 53 bp, Artificial Sequence
  Synthetic Sequence
acggcggaaaccattgccacaaaacgttgtagctccctttctcatttcgcagt

SEQ ID NO: 724 - DNA, 54 bp, Artificial Sequence
  Synthetic Sequence
aataataacccaatacacgatgttaagttgtagctccctttctcatttcgcagt

SEQ ID NO: 725 - DNA, 171 bp, Artificial Sequence
  Synthetic Sequence
ttgtcttatttatatacaaatagattattgacttatcatctcacaacggctagaatcccaaacatattgtcgcactgcgaaatgagaaccgttgctacaataaggccgtctgaaaagatgtgccgcaacgctctgccccttaaagcttctgctttaaggggcatcgtttat

SEQ ID NO: 726 - DNA, 35 bp, Artificial Sequence
  Synthetic Sequence
ggtaactttgcctaggatagttttagagctatgtt

SEQ ID NO: 727 - DNA, 22 bp, Artificial Sequence
  Synthetic Sequence
cattatgttttagagctatgtt

SEQ ID NO: 728 - DNA, 24 bp, Artificial Sequence
  Synthetic Sequence
gagttttagagctatgttattttg

SEQ ID NO: 729 - DNA, 27 bp, Artificial Sequence
  Synthetic Sequence
ttatagttttagagctatgttattttg

SEQ ID NO: 730 - DNA, 26 bp, Artificial Sequence
  Synthetic Sequence
taaatgttttagagctatgttatttt

SEQ ID NO: 731 - DNA, 23 bp, Artificial Sequence
  Synthetic Sequence
tacaagttttagagctatgttat

SEQ ID NO: 732 - DNA, 30 bp, Artificial Sequence
  Synthetic Sequence
ttcatgttgttttagagctatgttattttg

SEQ ID NO: 733 - DNA, 28 bp, Artificial Sequence
  Synthetic Sequence
gttttagagctatgctatttcgaatact

SEQ ID NO: 734 - DNA, 92 bp, Artificial Sequence
  Synthetic Sequence
attgttagtattcaaaataacatagcaagttaaaataaggctttgtccgttatcaacttttaattaagtagcgctgtttcggcgcttttttt

SEQ ID NO: 735 - DNA, 43 bp, Artificial Sequence
  Synthetic Sequence
gccattaattaatatggtgagttttagagctgtgttgtttcga

SEQ ID NO: 736 - DNA, 43 bp, Artificial Sequence
  Synthetic Sequence
gctagcgcagttagtgctctgttttagagctgtgttgtttcga

SEQ ID NO: 737 - DNA, 43 bp, Artificial Sequence
  Synthetic Sequence
tgttgtgtcatcatagttaggttttagagctgtgttgtttcga

SEQ ID NO: 738 - DNA, 43 bp, Artificial Sequence
  Synthetic Sequence
caattagacaatagacaaacgttttagagctgtgttgtttcga

SEQ ID NO: 739 - DNA, 44 bp, Artificial Sequence
  Synthetic Sequence
ttcggacatgacttgccacagttttagagctgtgttgttatcga

SEQ ID NO: 740 - DNA, 107 bp, Artificial Sequence
  Synthetic Sequence
gttggaatcattcgaaacaacacagcaagttaaaataaggcagtgatttttaatccagtccgtacacaacttgaaaaagtgcgcaccgattcggtgcttttttattt

SEQ ID NO: 741 - RNA, 20 nt, Artificial Sequence
  Synthetic Sequence
ugguccgcugccguucgcuu

SEQ ID NO: 742 - RNA, 20 nt, Artificial Sequence
  Synthetic Sequence
gcagaaaaaaaccauggguu

SEQ ID NO: 743 - RNA, 20 nt, Artificial Sequence
  Synthetic Sequence
aaaaaaccgguucagcugcc

SEQ ID NO: 744 - RNA, 20 nt, Artificial Sequence
  Synthetic Sequence
aacuuucaguuuagcggucu

SEQ ID NO: 745 - RNA, 20 nt, Artificial Sequence
  Synthetic Sequence
aggacaguuucagguagucc

SEQ ID NO: 746 - RNA, 20 nt, Artificial Sequence
  Synthetic Sequence
aaccgguuuuuuagccaugu

SEQ ID NO: 747 - RNA, 20 nt, Artificial Sequence
  Synthetic Sequence
uugacagcuagcucaguccu

SEQ ID NO: 748 - RNA, 20 nt, Artificial Sequence
  Synthetic Sequence
cccggaagagagucaauuca

SEQ ID NO: 749 - RNA, 20 nt, Artificial Sequence
  Synthetic Sequence
cccugaauugacucucuucc

SEQ ID NO: 750 - RNA, 20 nt, Artificial Sequence
  Synthetic Sequence
gaauucauuaaagaggagaa

SEQ ID NO: 751 - RNA, 20 nt, Artificial Sequence
  Synthetic Sequence
gaauggugcaaaaccuuucg

SEQ ID NO: 752 - DNA, 141 bp, Artificial Sequence
  Synthetic Sequence
cgacaccatcgaatggtgcaaaacctttcgcggtatggcatgatagcgcccggaagagagtcaattcagggtggtgaatttgacagctagctcagtcctaggtataatagatctgaattcattaaagaggagaaaggtacc

SEQ ID NO: 753 - RNA, 20 nt, Artificial Sequence
  Synthetic Sequence
aacuuucaguuuagcggucu

SEQ ID NO: 754 - RNA, 20 nt, Artificial Sequence
  Synthetic Sequence
uggaaccguacuggaacugc

SEQ ID NO: 755 - RNA, 20 nt, Artificial Sequence
  Synthetic Sequence
gguaguccgggaugucagcc

SEQ ID NO: 756 - RNA, 20 nt, Artificial Sequence
  Synthetic Sequence
aggacaguuucagguagucc

SEQ ID NO: 757 - RNA, 20 nt, Artificial Sequence
  Synthetic Sequence
gucuugcagggaggaguccu

SEQ ID NO: 758 - RNA, 20 nt, Artificial Sequence
  Synthetic Sequence
gcauaaccggaccgucggac

SEQ ID NO: 759 - RNA, 20 nt, Artificial Sequence
  Synthetic Sequence
cuuucagagcaccgucuucc

SEQ ID NO: 760 - RNA, 20 nt, Artificial Sequence
  Synthetic Sequence
gaugguguagucuucguugu

SEQ ID NO: 761 - RNA, 20 nt, Artificial Sequence
  Synthetic Sequence
caucuaauucaacaagaauu

SEQ ID NO: 762 - RNA, 20 nt, Artificial Sequence
  Synthetic Sequence
caucuaauucaacaagaauu

SEQ ID NO: 763 - RNA, 20 nt, Artificial Sequence
  Synthetic Sequence
aguagugcaaauaaauuuaa

SEQ ID NO: 764 - RNA, 20 nt, Artificial Sequence
  Synthetic Sequence
acaaguguuggccacggaac

SEQ ID NO: 765 - RNA, 20 nt, Artificial Sequence
  Synthetic Sequence
uuucaugugauccggauaac

SEQ ID NO: 766 - RNA, 20 nt, Artificial Sequence
  Synthetic Sequence
cguuccuguacauaaccuuc

SEQ ID NO: 767 - RNA, 20 nt, Artificial Sequence
  Synthetic Sequence
uaacucgauacgauuaacaa

SEQ ID NO: 768 - RNA, 20 nt, Artificial Sequence
  Synthetic Sequence
auaauggucugcuaguugaa

SEQ ID NO: 769 - RNA, 20 nt, Artificial Sequence
  Synthetic Sequence
auguggucacgcuuuucguu

SEQ ID NO: 770 - RNA, 20 nt, Artificial Sequence
  Synthetic Sequence
aacuuucaguuuagcggucu

SEQ ID NO: 771 - RNA, 20 nt, Artificial Sequence
  Synthetic Sequence
uggaaccguacuggaacugc

SEQ ID NO: 772 - RNA, 20 nt, Artificial Sequence
  Synthetic Sequence
gaugguguagucuucguugu

SEQ ID NO: 773 - RNA, 20 nt, Artificial Sequence
  Synthetic Sequence
uuccggguacauacguucgg

SEQ ID NO: 774 - RNA, 20 nt, Artificial Sequence
  Synthetic Sequence
gguaguccgggaugucagcc

SEQ ID NO: 775 - RNA, 20 nt, Artificial Sequence
  Synthetic Sequence
aggacaguuucagguagucc

SEQ ID NO: 776 - RNA, 20 nt, Artificial Sequence
  Synthetic Sequence
uugacagcuagcucaguccu

SEQ ID NO: 777 - RNA, 20 nt, Artificial Sequence
  Synthetic Sequence
aaccgguuuuuuagccaugu

SEQ ID NO: 778 - RNA, 20 nt, Artificial Sequence
  Synthetic Sequence
aaaaaaccgguucagcugcc

SEQ ID NO: 779 - RNA, 20 nt, Artificial Sequence
  Synthetic Sequence
uugggaagggcgaucggugc

SEQ ID NO: 780 - RNA, 20 nt, Artificial Sequence
  Synthetic Sequence
gcuggccugguucaccacgc

SEQ ID NO: 781 - RNA, 20 nt, Artificial Sequence
  Synthetic Sequence
guagccaaaucgggaaaaac

SEQ ID NO: 782 - RNA, 20 nt, Artificial Sequence
  Synthetic Sequence
cgguaagccuucgcacauau

SEQ ID NO: 783 - RNA, 20 nt, Artificial Sequence
  Synthetic Sequence
acaagaaccauucgagaguc

SEQ ID NO: 784 - RNA, 20 nt, Artificial Sequence
  Synthetic Sequence
gucaagcagcaguauaugcu

SEQ ID NO: 785 - RNA, 20 nt, Artificial Sequence
  Synthetic Sequence
ugugaguuagcucacucauu

SEQ ID NO: 786 - RNA, 20 nt, Artificial Sequence
  Synthetic Sequence
auguuguguggaauugugag

SEQ ID NO: 787 - RNA, 20 nt, Artificial Sequence
  Synthetic Sequence
cuuccggcucguauguugug

SEQ ID NO: 788 - RNA, 20 nt, Artificial Sequence
  Synthetic Sequence
gggcgaggagcuguucaccg

SEQ ID NO: 789 - RNA, 20 nt, Artificial Sequence
  Synthetic Sequence
ggccacaaguucagcguguc

SEQ ID NO: 790 - RNA, 20 nt, Artificial Sequence
  Synthetic Sequence
gcccuugcucaccaugguug

SEQ ID NO: 791 - RNA, 20 nt, Artificial Sequence
  Synthetic Sequence
gaccaggaugggcaccaccc

SEQ ID NO: 792 - RNA, 20 nt, Artificial Sequence
  Synthetic Sequence
gguggugcagaugaacuuca

SEQ ID NO: 793 - RNA, 20 nt, Artificial Sequence
  Synthetic Sequence
guggucacgagggugggcca

SEQ ID NO: 794 - RNA, 20 nt, Artificial Sequence
  Synthetic Sequence
gcacggggccgucgccgaug

SEQ ID NO: 795 - protein, 240 aa, Acetobacter aceti
MANIAENLVFGIDLGIGSCGWAVLNQKAKDENIVALGSWCFDVPETDKERIPTNQIRRANRLLRRVIRRRRNRMAEIRRLFASKGMLDTADPDALAKISADPWEMRAKGLDYQLTPQEFAVALGHIAKRRGFKSAAKRVSTNAPSEDSKMLAALEKTKEQSAQYRTIGEMFARDPAYADRRRNRDGCFDRTMSREDLFKETQILFESQRRLGNFSATSETEQAFIDIAFRQKPMQDSERL

SEQ ID NO: 796 - protein, 400 aa, Acetobacter aceti
SFERFRLLCRLVNLRVTDGLEDRPLTPEELRLACEDAGKTRKLSVKKVRSLIGLRDDQRFTTIPPDQEQHDIAARTGDALTGTATFRAILGESFWRQLLPHPEQLDRAAWIISFHELTDTIISKLATIGLPSEVMELIRKALEDGKFSKFKGAASLSDKAARKLIPFLQEGLTYDKACQKAGYNHAASKFTHYDSIDTKAKFNSLMDDVRDSITNPVARKAISEGMKQVWAMRNQWGLPGAICIELARDVGNSAEKRREIESGIKKNTAQRERERQEAKEHLNQSDISSETLLRYRLWKEQGGRCCYTDQPITPSQLIASDNSVQVDHILPWSRFGDDSYLNKALCTAKANQEKKNRTPWEWIHNQKGVEAWNHFTAAVESRKETRGLKKRNFLLKSSKE

SEQ ID NO: 797 - protein, 376 aa, Acetobacter aceti
YAARVMAEAVRLLYPSGNRAEKGGVKRVFTRPGALTAALRHAWGVESLKKINGKRLNDDRHHALDAAVVAAVSEKEIQKLTKSFQICEQKGLARPMRDVPMPWEGFRHQLETAYADIRVARPERRRARGKGHDATIRQLREEKDGPVVYERRAISDLKLTDLERIKDPERNSAIISSLRTWIEKGKPADYPPQSPKGDEIRKIRVMSRNKPAVSVRGGTADRGEMTRVDVFTKMGKKGKPEWFLVPIYRHQVIDRIQWPQPPNQAAANGKSEKNWPTMGLEHEFRFSLYPRSYVQIVKRDGEIIEGYFAGLDRTVAAFSLLSSSDPTSIQRGIGAKTLESIRKYNVNRFGDISMVEQETRTWHGDVCISPDQPDSA

SEQ ID NO: 798 - protein, 1054 aa, Actinobacillus suis
MKLTPLNYILGLDLGIASVGWAVVEIDEQENPLGLIDVGVRTFDRAEVPKTGESLALARRLARSARRLVKRRADRIKKAKRLLKAENILLSADEHLPNDVWQLRVKGLDQKLERQEWAAVLLHLLKHRGYLSQRKNESKSENKELGALLSGVETNHQILQSAEYRTPAEIAVKKFHVEDGHIRNQRGAYTHTFSRLDLLAEMELLFQRQTDLGNPHTSAKLLENLTALLMWQKPALAGEAILKMLGKCTFEPTEYKAAKNSYSAERFVWLTKLNNLRILEQGAERALTDNERFALLDQPYEKAKFTYAQARTMLALPDEAIFKGVRYQGEDKKAVETKTILMEMKAYHQIRKALENADLKAEWNELKNNSELLDDIGTAFSLHKTDEDICRYLDGKLSESILNALLENLNFDKFIQLSLKALQQILPLMLQGQRYDEAVSAIYGDHYGKKSAEINRLLPTIPADEIRNPVVLRTLTQARKVINAVVRLYGSPARIHIETGREVGKSYQDRKKLEKQQEDNRKQRESAVKKFKEYFPNFVGEPKGKDILKMRLYELQQAKCLYSGKSLELHRLLEKGYVEVDHALPFSRTWDDSFNNKVLVLANENQNKGNLTPYEWLDGKNNSEHWQNFVARVQTSGFSHTKKQRILSHKLDEKGFIERNLNDTRYVARFLCNFIADNMLLTGKGKRKVFASNGQITALLRGRWGLQKVRDDNDRHHALDAVVVACSTVVMQQKITRFVRYEEGNVFSGERIDRETGEIIPLHFPSPWAFFRENVEIRIFSENPKLELENRLPDYPQYNHEFVQPLFVSRMPTRKMTGQGHMETVKSAKRLDEGLSVLKVPLTQLKLSDLERMVNREREVTLYESLKARLEQFGNDPAKAFAEPFHKKGGAVVKAVRVEQTQKSGVLVRDGNGVADNASMVRVDVFTKGGKYFLVPIYTWQVAKGILPNKAVTANVDEIDWLEMDESYQFIFTMYPNDLVKVKLKKEEFFGYYGGLDRATGAIVIKEHDLEKSKGKQGIYRIGVKLALSFEKYQVDELGKNIRPCRPTKRQHVR

SEQ ID NO: 799 - protein, 239 aa, Actinobacillus ureae
MEIRIFSENPKLGLENRLPGYPQYNHEFVQPLFVSRMPTRKMTGKGHMETVKSAKRLDEGLSVLKVPLTQLKLSDLERMVNREREDALYQSLKAHLEQFGNDPAKAFAEPFHKKGGTVVKAVRVEQTQKSGVLVRDGNGVADNTSMVRVDVFTKAGKYFLVPIYKWQVAKRILPNKAVTAGVDEIDWLEMDSSYQFIFTMYANDLVKVKLKKRSILGLLRWFRSCNWGYCYQRTRFREI

SEQ ID NO: 800 - protein, 400 aa, Actinobacillus ureae
MKLTPLNYILGLDLGIASVGWAVVEIDEQENPLGLIDVGVRTFDRAEVAKTGESLALARRLARSSRRLVKRRADRIKKAKRLLKAENLLLSADEILPNDVWQLRVKGLDQKLERQEWAAVLLHILKHRGYLSQRKNESKSENKELGALLSGVATNHQLLQTAEYRTPAEITVKKFQAEENGHGHIRNQRGDYSHTFDRKDLLAEMKLLFQRQAELGNPHTSEKLLENLTTLLLWQKPALAGEAILKMLGKCTFEPAEYKAAKNSYSAERFVWLTKLNNLRILENGIERALTDNERFTLLDQPYEKAKLTYAQARTMLALSDEAIFKGVRYQGEDKKAAEKVALIEMKGYQHIRKALEGAGLKAEWNELKNNSELLDDIGTAFSLYFSISNLPTEIAYFTP

SEQ ID NO: 801 - protein, 1113 aa, Actinomyces georgiae
MSASSQNVERIRYKVGIDVGLRSIGFCAVQVDADDRPVKLLNTVVHVHDAGVSPADAKKADTRKLVSGVARRTRRLYRTRKRRLVDLDRQLDGLGWPLVDPARFADPREPWFAREKLVSGRVDDADERKELLSVALRHIAHHRGWRNPYSTVESLQADAPPSEFLQGLNQRVSEKLGTELDPGLTQGQLVAKLLHRFPNAKIRGPEGILRGKLHQSDNAGELRLICRTQGLDCHITEELVRLVFQAKSPKANKEMRKRIGRDQLPGQGAHIRAEKAHPVFQRFRIVAVLANLRIREAHVDRRLTAEEMRTLTDFLLGLAGSEQPTWEELADNLNIERHQLRGTAKASVDGAPALRFPPIDATTDRIYASKLKWLAEWWRQADEERRGYMVDALSNSGGSEDEPYLDDEIAEMLEQASEEDQAKLDSLHLPGGRASYCLDTLRRLTDAMLGGGLDLFEARKAVFHVDDDWAPPTDPIGAPVGNPPVDRVLKHVARWLEAATGRWGAPQTINIEHVREGLGSEKAARELTRMNDRRRRNNQKLVEEMGEKLGMSGRIRRSDRMRYEAIRRQNCECLYCGQPITYQTMEMDHIVPRAGAASTNSRSNLAAVCRRCNHQKGKLPFAVWAESQDSPAEVRLQDAVQRVRHWLRDAGMGQKELQALRVQVIARLKSKRPDEEFDGRSMESIAWMANELRARVEAQYRGSGTTVRVYRGALTAEARKASGFEGRVNLIGGRGKDRFDRRHHAMDALVIALMNQSVAQTLALRLNMRDSQWLTQSEQTWRQFHGAPGEAARKWEAWDRDMRDASDLFNLALDGGRIPITENVRLRVGNGRVHEDGVIRFKPEYEVKGKTIKGGEARLLGDSLPSEQIDRAETPALWTALTRLPEYDRKSGLPENPDRVIRVNGAVVQATDRIRFFGTPASVAVRGGYAKLGESIHHARIYRINGKTPKYAMIRVYTIDLMRLNHEDIFTAVLKPSTISMRCAEKKLKYAIAEGNAEQIGWLVEGDQLELDAAAYAKGVGADLMREYPMATCWRVAGFPDEAKLRLRPVLLAAEGMGEDAPKFMREVLENQGWRPAVNALLSPGSVRVVRRNVLGEPRFKSSGHLPTTVDLV

SEQ ID NO: 802 - protein, 1101 aa, Actinomyces naeslundii
MWYASLMSAHHLRVGIDVGTHSVGLATLRVDDHGTPIELLSALSHIHDSGVGKEGKKDHDTRKKLSGIARRARRLLHHRRTQLQQLDEVLRDLGFPIPTPGEFLDLNEQTDPYRVWRVRARLVEEKLPEELRGPAISMAVRHIARHRGWRNPYSKVESLLSPAEESPFMKALRERILATTGEVLDDGITPGQAMAQVALTHNISMRGPEGILGKLHQSDNANEIRKICARQGVSPDVCKQLLRAVFKADSPRGSAVSRVAPDPLPGQGSFRRAPKCDPEFQRFRIISIVANLRISETKGENRPLTADERRHVVTFLTEDSQADLTWVDVAEKLGVHRRDLRGTAVHTDDGERSAARPPIDATDRIMRQTKISSLKTWWEEADSEQRGAMIRYLYEDPTDSECAEIIAELPEEDQAKLDSLHLPAGRAAYSRESLTALSDHMLATTDDLHEARKRLFGVDDSWAPPAEAINAPVGNPSVDRTLKIVGRYLSAVESMWGTPEVIHVEHVRDGFTSERMADERDKANRRRYNDNQEAMKKIQRDYGKEGYISRGDIVRLDALELQGCACLYCGTTIGYHTCQLDHIVPQAGPGSNNRRGNLVAVCERCNRSKSNTPFAVWAQKCGIPHVGVKEAIGRVRGWRKQTPNTSSEDLTRLKKEVIARLRRTQEDPEIDERSMESVAWMANELHHRIAAAYPETTVMVYRGSITAAARKAAGIDSRINLIGEKGRKDRIDRRHHAVDASVVALMEASVAKTLAERSSLRGEQRLTGKEQTWKQYTGSTVGAREHFEMWRGHMLHLTELFNERLAEDKVYVTQNIRLRLSDGNAHTVNPSKLVSHRLGDGLTVQQIDRACTPALWCALTREKDFDEKNGLPAREDRAIRVHGHEIKSSDYIQVFSKRKKTDSDRDETPFGAIAVRGGFVEIGPSIHHARIYRVEGKKPVYAMLRVFTHDLLSQRHGDLFSAVIPPQSISMRCAEPKLRKAITTGNATYLGWVVVGDELEINVDSFTKYAIGRFLEDFPNTTRWRICGYDTNSKLTLKPIVLAAEGLENPSSAVNEIVELKGWRVAINVLTKVHPTVVRRDALGRPRYSSRSNLPTSWTIE

SEQ ID NO: 803 - protein, 1181 aa, Actinomyces sp.
MLHCIAVIRVPPSEEPGFFETHADSCALCHHGCMTYAANDKAIRYRVGIDVGLRSIGFCAVEVDDEDHPIRILNSVVHVHDAGTGGPGETESLRKRSGVAARARRRGRAEKQRLKKLDVLLEELGWGVSSNELLDSHAPWHIRKRLVSEYIEDETERRQCLSVAMAHIARHRGWRNSFSKVDTLLLEQAPSDRMQGLKERVEDRTGLQFSEEVTQGELVATLLEHDGDVTIRGFVRKGGKATKVHGVLEGKYMQSDLVAELRQICRTQRVSETTFEKLVLSIFHSKEPAPSAARQRERVGLDELQLALDPAAKQPRAERAHPAFQKFKVVATLANMRIREQSAGERSLTSEELNRVARYLLNHTESESPTWDDVARKLEVPRHRLRGSSRASLETGGGLTYPPVDDTTVRVMSAEVDWLADWWDCANDESRGHMIDAISNGCGSEPDDVEDEEVNELISSATAEDMLKLELLAKKLPSGRVAYSLKTLREVTAAILETGDDLSQAITRLYGVDPGWVPTPAPIEAPVGNPSVDRVLKQVARWLKFASKRWGVPQTVNIEHTREGLKSASLLEEERERWERFEARREIRQKEMYKRLGISGPFRRSDQVRYEILDLQDCACLYCGNEINFQTFEVDHIIPRVDASSDSRRTNLAAVCHSCNSAKGGLAFGQWVKRGDCPSGVSLENAIKRVRSWSKDRLGLTEKAMGKRKSEVISRLKTEMPYEEFDGRSMESVAWMAIELKKRIEGYFNSDRPEGCAAVQVNAYSGRLTACARRAAHVDKRVRLIRLKGDDGHHKNRFDRRNHAMDALVIALMTPAIARTIAVREDRREAQQLTRAFESWKNFLGSEERMQDRWESWIGDVEYACDRLNELIDADKIPVTENLRLRNSGKLHADQPESLKKARRGSKRPRPQRYVLGDALPADVINRVTDPGLWTALVRAPGFDSQLGLPADLNRGLKLRGKRISADFPIDYFPTDSPALAVQGGYVGLEFHHARLYRIIGPKEKVKYALLRVCAIDLCGIDCDDLFEVELKPSSISMRTADAKLKEAMGNGSAKQIGWLVLGDEIQIDPTKFPKQSIGKFLKECGPVSSWRVSALDTPSKITLKPRLLSNEPLLKTSRVGGHESDLVVAECVEKIMKKTGWVVEINALCQSGLIRVIRRNALGEVRTSPKSGLPISLNLR

SEQ ID NO: 804 - protein, 1120 aa, Actinomyces sp.
MNAMKQYNAGIDVGINSVGFAAIEVDSKGLPLNILNNMVVLHDSGVDPGTAKTGATRLANSGTARRTRKLIARRRKRLQKLDRYIEVQGWPLVDFSSLPDPYTPWKIRAKLTQDRLEGEEQGRGLSIALRHMARHRGWRNPYEGVESLHSPKEASKQFKDLKDRVTKVSGVIFDEDATPAEVVCDIGLSPKQRLRSAPSAKYKEGATLADEPVGGKSKEGLLGGKLMQSDNANELRKIGIVQGLSNEKVNEIIDQVFASESPKGQAGKRAKKDELPGQEQYVRALRAHLAFQRFRIVAAVANLRILEAEPKHERLLSQSEKDKVIEFLMSADGDDGVTWSDVAEELGIERECLSGTAKRGADGERPSSFPPTNSTNISIVRSKVKPLIEWWRKASDDEQATLVTALSNADELTDDQPSAETVRQFLSSPDEQSQEKIDKISLPKGRAAYSVNSLERLTRRMLKDSVDLFEARKREFGVDNNWTPTPDSIGEPVGNPAVDRVLKIVNRWLLAVTRKWGPPKVVNIEHVRVGFTSAAQTRKYEEENKTNRERNLAILEELRDKFGTSGKIRREDITRFAALRRQNCQCAYCGEAITFFDCEMDHIVPRKGPGSTNTRNNLVAICERCNKSKSNMPFSLWAQNCDIPGVSVEAVIDRVRTWIKDPELNPKQYNNFKKDVIERLRKTVDDDAIDNRSIESVAWMATELADRIGSHFRTAGANTKVRVYRGWLTSEARKASGFEGKINLIGGRGKTRLDRRHHAMDAATIALMRQSVAQTLVERASIRESDRLRRVVSSSWKDYRGADRDKQFSYGSWLNSMNALAELFNRAIDADGIPVTQNLRLRLGNGEAHDATIRSLEKKRVGASWTIGEIDRASTPQLWLALTRQEDFDQNDGLPANASRELRVKNHWFHAEENVTLFPTKSAAIAVRGGYAEIGNTIHHARLYKLPGKKLTYGMIRVFAIDLLCAWHTDLFSSPLLPESISLRTAETKVRRAVEDGAAMYIGWLVDGDEIVLDPETKAFKSNKIGEYLCEFPGTKRWKVDGFPDKEKLRLRPLQLAGEGLPEDVSAGTEEILGPKGNGWRVAINALFKSSQLVVVRRTALGMVRKLSRRHLPLTTRLRG

SEQ ID NO: 805 - protein, 1095 aa, Actinomyces sp.
MPAHHLRVGIDVGTHSVGLATLRVDDQGTPIELLSALSHIHDSGIGKEGQKDHDTRKKLSGVARRTRHLLRNRRERLQQLDKVLVDLGFPIPKPEEYPDLSERTDPYRVWRVRARLVEETLPEELRGPAISMAVRHIARHRGWRNPYSKVESLLSPAEESSFMKALRKRIMTKTGEVLDDDITPGQAMAQVALTHKIYMRGPEGILGKLHQSDNANEIRKICARQGISSDVCKQLLRAVFKAESPRGSAVSRVAPDPLPGQGSFRRAPKCDPEFQRFRIISIVANLRISETKGENRPLTVDERRQVVAFLMEDSQADLTWVDVAEKLRVSRQALRGTAMLTADGERSAAQPPIDVTDQIMRKTKISALKTWWDKADAERRGAMVRYLYEGLEDSECAEVIAKLPEKDHAKLDSLHLPAGRAAYSRESLTALSDHMLETTNDLHEARKRLFGVDDSWAPPAEPVGAPVGNPSVDRTLKIVARYLSAVESIWGTPEVIHVEHVRDGFTSERTAEERDKANRSRHNDNQKAIEKIQHDYGKEGYISRGDIVRFHALKLQGSACLYCGTTIGYHTCQLDHIVPQAGPGSNNRRGNLVAVCERCNHSKSNTPFAVWAQKCGIPHVGVKEAISRVNGWVEHNHSTSSGDLTRLKKEVIARLRRTQKDPEIDERSMESVAWMANELHHRIAAAYPETTVMVYRGSITAAARKAASIESRINLIGEKGRKDRLDRRHHAVDASVVALMEPSVAKTLAERSSLRGEQRLTGQEQTWKQYTGLTVGARERFEAWRGHMHRLTELFNESLAADEVYVTQNIRLRLSDGSAHTVKASKLVSHRLGDGLTVQQIDRACTPALWCALTREIDFDEKNGLPAREDRVIRVHGQEISSADCIQVFSKRKKTKSDRDEAPFGAIAVRGGFVEIGSSIHHARIYRIEGEKPAYAMLRVFTHDLLSQRHGDLFSAVIPPQSISMRCAATELRQAISEGRATYLGWIVSGDELHIPVETFTTHKIGSFLKDYPNTTRWRICGYDSETMLILKPRILSAEGLNNSSDIAEYVIKNKGWRVAINKLAKVHPTVVRRDALGRPRHSSRSNLPVTWSIE

SEQ ID NO: 806 - protein, 1144 aa, Actinomyces sp.
MSMIDSSENVPGIRYRVGIDVGLKSIGFCAVEVDRNDQPVRMLNSMVFIHDAGVDPNENKAAKSRKLTAGVARRTRRLYRTRHQRLVNLDRVLSKEFGWPLPDLTSFKDPREPWHVRAGLLEGYIADDEKRKEALSIALRHIARHRGWRNPYAKVETLLQPSEPSDFLKGLNDRISEELGRAFPADATPGQLVDTYLAHPDYVGRAGTPKLRGPQGILAGKLHQSDNAQEIRGICDVQRIEPAERDRLIRVVFEAKSPKGSAKERGLVGYDELPGQGRHVRAEKAHPAFQLFRMVSVLANLRIREGREERPLTPDELEDLVDFINQVSLKQEVTWQDLADKLRIERADLRGTAKASFDGSPVLRNPPTDVTTEKIMACKVKWLKEWWKEADDEQRGYMVDAFSNSGGSEDGTDVNDEVAELLEQATEDDQLEFEKISLPQGRAAYSLDSLRRLTDRMLRDGVDLHTARRLEFNVGDDWKPAVEPIGAPTGNPAVDRVLKQVSRWLHAATERWGEPTVINIEHARDGLGSERVARELMRENEKRRKANASAVAEMAAKLKLSGKVHRSDQIRYFALQRQNCQCLYCGAPITYTTAEMDHIVPRADGSSTNDRSNLAAVCRTCNHMKGKIPFAVWASSDKANQGVSLTGALERVNMWQRDSGMSPRQLKQLQREVCARLKSKKPDQEFDGRSMESVAWMAVELRTRIEGFYRSRDEESVPSVGVYRGQLTAEARRASGFESRVNLIGGRGKTRFDRRHHAMDALVIALMNPSVSRTLALRLNMRDAQRLTGVEETWKHFYGKPGEASKRFESWRESMLRGVELFNIALSDNAIPFVENIRLRVGSSVIHDATVHSFCPPKTPDGKQIITKGYGEQHSLGSAMPVELIDRAETPALWTALTRCPDFDPKKGLPENPQRTISVNGTRVGPTELVNFFEFSKSGPKACLKVRGGYVDLSGAIHHARIYRIAGKKTAYAMIRVFQVDLLRLKDHDVFTTPLKPSTISMRTAEPKIREALANGTATQIGWLVEGDELVIDTSKYSGGFIGEVLARYPEATSWRVAGFMTPAKLRIKPILLSKEGFVDETQAALLGVEVTSEAIQKTVDRPGWLPAVNVLFGAGGVRVIRRNCLGEERYHSSASLPVSMTLE

SEQ ID NO: 807 - protein, 1103 aa, Actinomyces sp.
MTKINDDLRYRVGIDVGLKSIGFCAVEVDENDQPLRLLNSMVFVHDAGVDPNENKAAKSRKLTAGVARRTQRGTAQNRRRLAELDRALSEELNWPLPNLEDFEDSYEPWHTRAELVEHYIKDDAERAEALAIAIRHIARHRGWRNPYLSVDSLLTPQEPSKFLRGLNERVTQALGREFPADATPGQLICAYIDSPKYAETQGIRGDSGILSGKLHQFDNVGEIRKICEVQRLDHDVFKLLVRKVFFAKSPRGSAAGLVGHDQIPGQGKYIRAEKAHPDFQLFRIVAVLTNLRIREGKAERCLTPDELRGLVDYILEVQLKQQVTWADLADNLGIERTDLRGTARASFDGSPALRFPPTDVTAEKIMASKVKWLKDWWDKADSERRGFMVDALSNSGGSTGDNDIDDEVAALLEAATEDEQAELEKIQLPQGRAAYSLDSLRRLTKRMLEEGVDLHTARKEEFNVDDDWRPEPEPIEAPVGNPAVDRVLKQVARWLNMATDRWGVPDVINIEHTRDGLGSEKVARELLRESQKRQDLNQKDMDKMIRELGISGKARRSSLIKYQAIQRQNSMCLYCGTEIGFETAEMDHIVPRALSGSTNDRSNLAAVCRACNHQKGAVPFAVWATSGEAHAGVSLEDAIKRVRLWQKGPGMSPKQHKAFQNEVISRLKSRKPDEEFDGRSMESVAWMAVELRTRIDGYYRKVNSDSVPKVGIYRGQLTAEARKASGFENRVNLIGGKGKTRFDRRHHAMDALVIAMMNQSVSQTLALRVNMRESQRITGQEETWKNFYGKPGQASERFEKWREGMLRAVELFNIELAKNAIPFHENVRLRVGSSKVHDDTVRKFIHAKLGEALSVAMIDCAETPALWTALTRLPDFDPKDGLPEDLSREIYIHSRKITADEQLNFFNSPSACLKVRGGYVEIGSSIHHARVYRIDGKKTTYSMVRVFATDLVKMTHEDVFTTPLKPSTISMRTADPKIRKALADGTATQIGWLVEGDELQLETDKYSGGLIGEVLAEYPQLTSWRVAGFYGVTQLRLRPYMLAAEGIPSDASESLRKVIEGKGWLPAINALLSSGCVKVVRRNCLGEPRFNAKSSLPVSQLLR

SEQ ID NO: 808 - protein, 1114 aa, Actinomyces turicensis
MQFHFYMVYVTMKGMNDKDASQQLRYRVGIDVGTHSIGFCAVEVDESGMPIQLLNSMVHKHDSGIDPGGNDTATTRLAEAGVARRTRRLIRRRKKRLQELDAFIEECGWPLVDLATITDARSPWRIRAHLATEHIDDEAEQGKLLSIALRHMARHRGWRSPYARISSLHIQADPSEQLKALAQRVSEKTGISLTADQTPAQLISVYLDVFETGKLRGPEGILGGKLMQSDNANELRRIATVQGLDNDLLKKIIGFVFAAESPKGSAAKRVGKDVLPGAHGLRAEKAHPAFQQFRIVSIVQNLRIKEGTGLRALTSEETEIVVDFLNQAGLTEAPTWEEVADNLEIPRSHLKGTATEGFDGIAPSTRPPFDVTSQKILNGKLKKLSAWWKDADYDHRCAMVNALSNVGSDDEGSLADDDVREFLSDFTDEELEALDKVELPGGRAAYSVDSLEKLTNTMLSEGCDLHSARKIAFGVDDSWTPPAEPIGQPVGNPAVDRVLKQVARWISAATNQWGTPESVNIEHVRDALGSEKASREYQRSLQTRRIRNEKLFAEMRERLDIGGKPRRSELTRYLALQRQNCQCLYCGMPITYTDAEMDHIVPRKGAASTNTRENFAAVCRACNHQKSNLPFAVWAEKTERPGVSVKEAYKRVSDMRIEPGMNGRQMNEFRKAIRLRLTTKHADAEIDGRSLESVAWMANELRHRIEGFYRSAENDVTVRVFRGAVTAEGRRASGFESRVNLIGGKGKTRLDRRHHAMDALTIALMEPGIAQTIALRMNMRESQRVLGEQETWKSFTGGSDTARKRWEHWCEEMLRASELFNVFLAEDRIPICQNKRLRLGSSAVHKAIVQPFEASDKRIVSDAMPVELIDRASTPALWTALTRDPDFDPKEGLPANPSRTIRLHDKRLGPNETVEFFPTAAACLAIRGGYCEIGAGIHHARIFRISGKKTTYAMLRVYQCDLVRFQKENLLTVELPANTISVRTAVPKLREALAHGTAEQIGWLVVGDELKIDLSGFTTGQIETFNETYPQATRWEVTGFPTKTQLRLKPLLIASEGLADDVPDDIVKIVKGPGWWPAIDKLLKIGNVVLYRRDTHGKPRVVSHRSLPLSSKLQ

SEQ ID NO: 809 - protein, 1113 aa, Alcanivorax sp.
MRYRVGLDLGTASVGAAVFSMDEQGNPMELIWHYERLFSEPLVPDMGQLKPKKAARRLARQQRRQIDRRASRLRRIAIVSRRLGIAPGRNDSGVHGNDVPTLRAMAVNERIELGQLRAVLLRMGKKRGYGGTFKAVRKVGEAGEVASGASRLEEEMVALASVQNKDSVTVGEYLAARVEHGLPSKLKVAANNEYYAPEYALFRQYLGLPAIKGRPDCLPNMYALRHQIEHEFERIWATQSQFHDVMKDHGVKEEIRNAIFFQRPLKSPADKVGRCSLQTNLPRAPRAQIAAQNFRIEKQMADLRWGMGRRAEMLNDHQKAVIRELLNQQKELSFRKIYKELERAGCPGPEGKGLNMDRAALGGRDDLSGNTTLAAWRKLGLEDRWQELDEVTQIQVINFLADLGSPEQLDTDDWSCRFMGKNGRPRNFSDEFVAFMNELRMTDGFDRLSKMGFEGGRSSYSIKALKALTEWMIAPHWRETPETHRVDEEAAIRECYPESLATPAQGGRQSKLEPPPLTGNEVVDVALRQVRHTINMMIDDLGSVPAQIVVEMAREMKGGVTRRNDIEKQNKRFASERKKAAQSIEENGKTPTPARILRYQLWIEQGHQCPYCESNISLEQALSGAYTNFEHILPRTLTQIGRKRSELVLAHRECNDEKGNRTPYQAFGHDDRRWRIVEQRANALPKKSSRKTRLLLLKDFEGEALTDESIDEFADRQLHESSWLAKVTTQWLSSLGSDVYVSRGSLTAELRRRWGLDTVIPQVRFESGMPVVDEEGAEITPEEFEKFRLQWEGHRVTREMRTDRRPDKRIDHRHHLVDAIVTALTSRSLYQQYAKAWKVADEKQRHGRVDVKVELPMPILTIRDIALEAVRSVRISHKPDRYPDGRFFEATAYGIAQRLDERSGEKVDWLVSRKSLTDLAPEKKSIDVDKVRANISRIVGEAIRLHISNIFEKRVSKGMTPQQALREPIEFQGNILRKVRCFYSKADDCVRIEHSSRRGHHYKMLLNDGFAYMEVPCKEGILYGVPNLVRPSEAVGIKRAPESGDFIRFYKGDTVKNIKTGRVYTIKQILGDGGGKLILTPVTETKPADLLSAKWGRLKVGGRNIHLLRLCAE

SEQ ID NO: 810 - protein, 1146 aa, Alicyclobacillus hesperidum
MAYRLGLDIGITSVGWAVVALEKDESGLKPVRIQDLGVRIFDKAEDSKTGASLALPRREARSARRRTRRRRHRLWRVKRLLEQHGILSMEQIEALYAQRTSSPDVYALRVAGLDRCLIAEEIARVLIHIAHRRGFQSNRKSEIKDSDAGKLLKAVQENENLMQSKGYRTVAEMLVSEATKTDAEGKLVHGKKHGYVSNVRNKAGEYRHTVSRQAIVDEVRKIFAAQRALGNDVMSEELEDSYLKILCSQRNFDDGPGGDSPYGHGSVSPDGVRQSIYERMVGSCTFETGEKRAPRSSYSFERFQLLTKVVNLRIYRQQEDGGRYPCELTQTERARVIDCAYEQTKITYGKLRKLLDMKDTESFAGLTYGLNRSRNKTEDTVFVEMKFYHEVRKALQRAGVFIQDLSIETLDQIGWILSVWKSDDNRRKKLSTLGLSDNVIEELLPLNGSKFGHLSLKAIRKILPFLEDGYSYDVACELAGYQFQGKTEYVKQRLLPPLGEGEVTNPVVRRALSQAIKVVNAVIRKHGSPESIHIELARELSKNLDERRKIEKAQKENQKNNEQIKDEIREILGSAHVTGRDIVKYKLFKQQQEFCMYSGEKLDVTRLFEPGYAEVDHIIPYGISFDDSYDNKVLVKTEQNRQKGNRTPLEYLRDKPEQKAKFIALVESIPLSQKKKNHLLMDKRAIDLEQEGFRERNLSDTRYITRALMNHIQAWLLFDETASTRSKRVVCVNGAVTAYMRARWGLTKDRDAGDKHHAADAVVVACIGDSLIQRVTKYDKFKRNALADRNRYVQQVSKSEGITQYVDKETGEVFTWESFDERKFLPNEPLEPWPFFRDELLARLSDDPSKNIRAIGLLTYSETEQIDPIFVSRMPTRKVTGAAHKETIRSPRIVKVDDNKGTEIQVVVSKVALTELKLTKDGEIKDYFRPEDDPRLYNTLRERLVQFGGDAKAAFKEPVYKISKDGSVRTPVRKVKIQEKLTLGVPVHGGRGIAENGGMVRIDVFAKGGKYYFVPIYVADVLKRELPNRLATAHKPYSEWRVVDDSYQFKFSLYPNDAVMIKPSREVDITYKDRKEPVGCRIMYFVSANIASASISLRTHDNSGELEGLGIQGLEVFEKYVVGPLGDTHPVYKERRMPFRVERKMN

SEQ ID NO: 811 - protein, 1552 aa, Anaerophaga sp.
MFSQRNNPYCELLQNVKQLYKEKFGKTNQVDNSIIYGFMKRILGLDLGTNSIGWALVENDENDRKGKIIGMGSRIIPMDMSELDNFNKGASISKTAERTRLRMTRRLRERHLLRRARLHRILNIMGFLPEHYRNSIDFIDKKGCFFEGQEPKIAYKPDKNSEQFCFLFTSSFHEMLEDFRKFQPELIQNRKKVPYDWTIYYLRKKALTQKISKEELAWIILNFNTKRGYYHLRGEDEDNQDNKKIKEFRALKVVNVTEREGANSSGKKWYDMELENGWVYSRQSNLPPNLEGKTIELIVSYTLDNNGNIKKDKNGKEKYSLSMPGEEDWNLVKIKTENDLKTSKKSVGEYIYDHLLKNPDQKIRGKLISTIERKFYKEELSRILKTQMNFYEELKNRELYQKCVEELYPNNKSHQQTLLQKDFIHLIVEDIIFYQRPLKSKRAFVNNCPLEYRVYVDKKSGELIKSGVKCIPKSHPLFQEFRLWQYVRNLRIYERERMVNGRLMVNVDVTNELLPDEEHIVRLFDLLNDRKSFKQDDVLRFVGIKSPKDRKRYSWNYPEDKELPGNETRHLILAWLKKVDGVPEDWLDPEKLKALWHLLYSVTDREEIIKGLHSFAKKYELPDTFVEHFKKIPRLEREYGSFSEKAIKKLLPLMRMGKYWKAEEIPADLLEKAQKIIDAEADDRISDEVREKLLHLKDISQLKGLPLWQASYLVYGRHSETGEVVKWRTSEDLEKYILQFKQHSLRNPVVEQVILEALRVVKDIWEHYGEGKEGFFNEIHVEIGRELKNPADKRKKITSQIQENENTNLRIKALLEELFNDPSVKNVRPYSPAQQEILRIYEDGVLNGQKEIPDDILKISKMARPSKSQLVKYKLWLEQKYRSPYTGEIIPLSQLFTSAYEIEHIIPQARYFDDSFSNKVICEAEVNREKGHQLAFEFITKRGGDEIELNFGKKVTILNVEEYQKFVKDHYGRSLRSLSKMRKLLMEDIPDDFIDRQLNDSRYISKVVRNLLSNIVRAEDENSLVSKHLITCTGGVTTRLKHEWGLNDVWNELITPRFVRLNKMGKEKFGEWINKKGKQVFQIQMPLELQKGFNKKRIDHRHHALDALVVACASRSHVNYLNNDSARANASETRYDLRNKLCYKDKTDSNGNYRWKFYKPWESFTEEAKNRLAGTVVSFKSNRRIMTRSSNRYFKWVDTSEGKKKKLVRQIKGDNQAIRKPLHKDTVLGKVSLRKEKKVSLSKAIDLWESIVDKPLKKRIQSLREQGYDKKLLLKYFKDRNNQFNGQDISRVNIYFFDNNLAARRVTLDASFNSEKRIDGITDSGIKKILYAHLQNEKYHGKKDEKGNEISPYELAFSPEGLEEMNANIKKLNGGKPHCPIYKVRLAETIGEKFKLGEKGNKNKKYVEAAKGTNLFFAVYVDEKGVRSFETIPFSVALERRKQKLAVVPEENENKEKLLFYLSPNDLVYVPDEDEKLIDYRQLSINPTRIYKMVSSSGTQCFFIPHFVASPIVQTMELGPNNKSERAWDGQMIKNVCYKLSVDRLGNVKIEK

SEQ ID NO: 812 - protein, 1515 aa, Anaerophaga thermohalophila
MKRILGLDLGTNSIGWALVESDEEQKSGKIQGIGSRIIPMDQNELDNFNKGNTVSQTAERTRLRMVRRLRERHLLRRERLHRVLKEIGFLPEHYLEQIDFTEKPGGFLPGKEPKIAYKPDNFKDKYDFLFQDSYHEMLSDFQDKNPEFIQKRKKVPQDWTIYYLRKKALTAKITKEELAWIILNFNQKRGYYQLRGEDEDVAKNTKKEEFHALKVVKVKEREDSEGASGKWYDIELENGWVYPRQSNIRPDWEGKILELIVTYNLDKDGNIKTDKEGNEKRSFRMPNKDDWTLRKKRTENEIEKSGKTVGEYIYDNLLDAPDLKIRGKLVSTIERKYYRSELEQILTAQKKYHPELSNSELFNKCISNLYPNNDIHRKALLSKDFVHLIINDIIFYQRPLKSKRSTVSNCPLEYRVYVDKVTGEKKKVPLKCIPKSHPLYQEFRLWQYVKNLRLFEKERFENGRLLTNVDVTEQFLPDEDKYVELFEFLNGRKTFKQDDILKFAGIKSAKDRVKYYWNYPQEKEYPGNETRYLIESRLKKIENVPDEWLNYEKIEELWHLLYSVTDKVEIEKGLQSFAAKYQLPDLFVEVFKGFPRMEREYGAFSKKAIKKLLPLMRMGKYWKLENINPDLIEKVQKIIDGEADDNINDGIRERFSEINEMSDLRGMPLWKASYLVYGRHSEAAEVIRWRTSADLDQYIKDFKQHALRNPIVEQVVLEALRVVKDVWNYFGEGREKFFDEIHVEIGRDLKNPADKRQKIANQIQENENTNLRIKALLVELFNDPEVQNVRPYSPVQQQLLKIYEDGVLNAERDIPDDIQKISRMANPTRNQLIRYKLWLEQKYRSPYTGEIIPLNKLFTSEYEVEHIIPRARYFDDSFSNKIISEAEVNRKKDRMLAFEFIKKLGGSTIDLNYGKKVSVLTVEEYQQFVKDHYGINPHSRLKMQKLLMDEIPESFIERQLNDSRYISKMVRNLLSNIVREENENSPVAKQLITCSGSITNTLKQEWGLNDVWNTIITPRFERLNKMGEQKYGEWVNKEGKPVFQIQMPLELQKGFNKKRIDHRHHALDALIVASATRSHVNYLSNEAAKTNAKDTRFDLRNRLCYKEKRGQNRNFTWRFYKPWNTFTEDAKNALNDIVVSFKSNHRVINKSTNRYFKWENLPGGMKKKRLVRQEKGDNWAIRQSLHKDTVLGKVSLRKVKPVSLSVALDSWNNIVDKALKKKIRSLKDQGYDKKLMLKYFKDRRNEYNGENISRVNVYYFDEEMAARRVDLDTSFNSEKRIEGITDSGIKKIIYAHLKNEKYHGQKDDKGKDISPYELAFSPEGIAEMNANIKQLNGGKPHCPIYKVRLAEPVGEKFQLGETGNKTEKLVEVAKGTNLFFGVYANDEGVRSFATVPFYLAVEREKQGLPAVPQENENGDQLLFWLSPNDLVYVPSEEDAHFANPKQIELDNSRIYKMVSSTGTQCFFIPHFVATPIVQTIELGPNNKSERAWDGQMIKKVCYKLSVDRLGNVEIE

SEQ ID NO: 813 - protein, 333 aa, Bacillus cereus
MMNPNNFTKEDFWRTIILYGLNQATYKIALGQSLIRFSEQQRNVVSMNELAEDFFDMYLERLKNGKPQLATPNRQTAMERIINSYNIGRLTRSQAIEKVEREAFNDVIDRFHTVDSLQVPMKFYEKTDKGIVIFDNVFEIFSDNNNFELRNELDARWDLLESAFEIKRTDSQLVNDIRKLYLANGYERTDITKNRSVLNGYQSNVCFYCGELMSDDDVHVDHVIPRQLINHDDIWNLVLSHGFCNQQKSDNLPDVNYIEKLIERNEYFIKSNHPISNKLKERLGNTPRRRRTTIDRIYEHAKLVLAPWKGIYGYNPATDPFYKTFIRNIVLSK

SEQ ID NO: 814 - protein, 1068 aa, Bacillus cereus
MRYVLGLDIGIASCGWAVINQEKERIEDLGVRIFDKAENPKDGKSLAAPRRDARSTRRTLRRKKHRMQRIKILLVKQGLLFKTELNHLYESATEFDVWNLRLDALERKLHPKEFARVLIHLAKRRGFKSNRKETTLSENGQILESISENQQIMEQQNYRTVGEMILKDKKFENHKRNKDGTYIGTVTRQQLQDEIQMIFHTQRLYKNDYATEEFESSYLEIWASQRPYASKDQIEKMIGYCTLEPKEKRTPKASWSFQYFVALQTINNLRLISKDKIEELSFEEKKQIMNLALEKPIVKYIDIRKLLSIPNDFQFNSLSYSADTVDTTLENKRCIELKEYHSINKVYKQVYGKNTPNLLPIDYDTIAYGLTIFKDDKDILEYLQNKYVNAKGKPIKNLAKKTYDDTFIQALLNLNFTKMGHLSFKALKNIIPFLEEGLSYDKACEKAGYNFKGTSYTERTKYLPVIPQNTNPVVHRALSQTRKVINAIIKKYGSPNAIHIETARELSKTFQERKEIDSRYQDNSKKNEHAIHKLKELGNINPSGINIVKFKLWSEQDGRCMYSGKYIEPHRLFEEGYTEVDHILPYSRSLDDSYNNKILTLGTENQRKGNKTPYEYMGNTSIWDEFETRVQSNKKINFKKQQKLLLQNFSYAREQEFIERNLNDTRYATIYLTSLIQQHLIFSESSSKKKVRTVSGIITSHLRSRWGFNKDRKEGHIHHALDAVIVAVTSNHMIQRVTKYYKLKELNKNLQAKQLPFPEPWEGFRLELEARISPNTQQYLKGIHFKNYADVNLSDIKPIFVSRMPKRSITGELHQETIRKFLGYNEKGKVLTAIKTKLEDIPFDANGDFPMYGKETDLYTYNAIKERYLSHEKDKRKSFQEPLYKPTKSGEIGPLIKSIKIMDTRTIVNPVNQGKGVVYNSKIARTDVFKKEDKYYLIPIYTIDLLKNILPHKAITAGKGYEDWTTIDSSFTFLFSLFPNDLIQIVPSKNKTIKARTTVSKKEILLPSLTGYFKGVHSGTAGITVETHDGSVIANVGSKQLLLFEKYQVDVLGHYTKIKEEKRMGMAI

SEQ ID NO: 815 - protein, 1078 aa, Bacillus cereus
MRYVLGLDIGIASCGWAVINQEKERIEDLGVRIFDKAENPKDGKSLAAPRRDARSTRRTLRRKKHRMQRIKVLLVKHGLLSKTELDHLYESATEVDVWNLRLDALERKLYPKEFARILIHLAKRRGFKSNRKETTLSENGQILESISENQQIMEKQNYRTVGEMILKDKKFENHKRNKNGTYVGTVTRQQLQDEIQMIFHAQRLYKNDYATEEFESSYLEIWASQRPYASKDQIEKMIGYCTLEPKEKRAPKASWSFQYFVALQTINNLRLISKDRIEELSFEEKKQIMNLALEKSIVKYIDIRKLLSVPNEFQFNSLSYSADTVDTAVESRKCIELKEYHSINKVYKQIYGENALNLLPKYYDTIAYGLTIFKDDKDILEYLQNKYVNAKGKPISNFANKTYDDTFIQALLNLNFTKMGHLSFKALKNIIPFLEEGLSYDKACEKAGYNFKGTSYTEQTKYLPVIPQNTNPVVHRALSQTRKVINAIIKKYGSPNAIHIETARELSKTFQERKEIDSMYQDNSKKNEHAIHKLKELGNINPSGINIVKFKLWNEQDGRCMYSGKYIEPHRLFEEGYTEVDHILPYSRSLDDSYNNKTLTLGTENQRKGNKIPYEYMGNTSIWNDFETRVQSNKKINKKKQQKLLLQHFSYAREQEFIERNLNDTRYATIYLSSLIQQHLIFSESSRKKKVHTVSGIITSHLRSRWGFNKDRKEGHIHHALDAVIVAVTSDHMIQRVTKYYKLKELNRNLQAKRMPFPEPWEGFRLELEARISPNTQQYLKGLRFKNYADVNLSEIKSIFVSRMPKHSITGELHQETIRKFIGYNEKGKVLTAIKTKLEDIPFDANGDFPMYGKESDLYTYNAIKERYLSHKKDKRKSFQEPLYKPTKSGGIGPLIKSIKIMDTRTIVNPVNQGKGVVYNSKIARTDVFKKEEKYYLIPIYTIDLMKNILPQKAITAGKGYEDWTTIDPSFTFLFSLFPNDLIQIVPSKNKTIKARTTVSKKEVLLPSLTGYFKGVHSGTAGITVETHDGSVIANVGSKQLLLIEKYQVDVLGNYTKIKEEKRIGLTTYNDNKKIAAC

SEQ ID NO: 816 - protein, 1088 aa, Bacillus smithii
MNYKMGLDIGIASVGWAVINLDLKRIEDLGVRIFDKAEHPQNGESLALPRRIARSARRRLRRRKHRLERIRRLLVSENVLTKEEMNLLFKQKKQIDVWQLRVDALERKLNNDELARVLLHLAKRRGFKSNRKSERNSKESSEFLKNIEENQSILAQYRSVGEMIVKDSKFAYHKRNKLDSYSNMIARDDLEREIKLIFEKQREFNNPVCTERLEEKYLNIWSSQRPFASKEDIEKKVGFCTFEPKEKRAPKATYTFQSFIVWEHINKLRLVSPDETRALTEIERNLLYKQAFSKNKMTYYDIRKLLNLSDDIHFKGLLYDPKSSLKQIENIRFLELDSYHKIRKCIENVYGKDGIRMFNETDIDTFGYALTIFKDDEDIVAYLQNEYITKNGKRVSNLANKVYDKSLIDELLNLSFSKFAHLSMKAIRNILPYMEQGEIYSKACELAGYNFTGPKKKEKALLLPVIPNIANPVVMRALTQSRKVVNAIIKKYGSPVSIHIELARDLSHSFDERKKIQKDQTENRKKNETAIKQLIEYELTKNPTGLDIVKFKLWSEQQGRCMYSLKPIELERLLEPGYVEVDHILPYSRSLDDSYANKVLVLTKENREKGNHTPVEYLGLGSERWKKFEKFVLANKQFSKKKKQNLLRLRYEETEEKEFKERNLNDTRYISKFFANFIKEHLKFADGDGGQKVYTINGKITAHLRSRWDFNKNREESDLHHAVDAVIVACATQGMIKKITEFYKAREQNKESAKKKEPIFPQPWPHFADELKARLSKFPQESIEAFALGNYDRKKLESLRPVFVSRMPKRSVTGAAHQETLRRCVGIDEQSGKIQTAVKTKLSDIKLDKDGHFPMYQKESDPRTYEAIRQRLLEHNNDPKKAFQEPLYKPKKNGEPGPVIRTVKIIDTKNKVVHLDGSKTVAYNSNIVRTDVFEKDGKYYCVPVYTMDIMKGTLPNKAIEANKPYSEWKEMTEEYTFQFSLFPNDLVRIVLPREKTIKTSTNEEIIIKDIFAYYKTIDSATGGLELISHDRNFSLRGVGSKTLKRFEKYQVDVLGNIHKVKGEKRVGLAAPTNQKKGKTVDSLQSVSD

SEQ ID NO: 817 - protein, 1069 aa, Bacillus thuringiensis
MNYDIGLRIGITSCGWSIINKDLERIEDLGVRVFEKAENPDGTASAAPRREARKSRRKHRRKKHRIERIKRLIVQHDLLSKKELDSLYLSPFNIDVWNLRVEALERKLDNREFARVLIHLVQRRGFQTIRKSVEIQEEGKLLENVSENERIMKVNGYKTVGEMFSKHEKFTHHKRNKDGSYTSVVTRSLLLKEIKTIFNSQRILGNVFSTQKLESDYLYIWGSQRPTLTYEQLMSMVGNCIYEKKEKRAPKTSWAFQYFSLLQKINKLKVSDDNTLRKLSKEERDIVIELAFKKKNVSFVDIRKALKLNDNTKFNHLTYSHVVETKKVEKATFIELKGYHLIKKQLKDRNVELTQELQPKDYDAIAAASTFFKNDIEFRDYLRNQYLDSNGKRKSNIANKVFEDKVIAAVFELNFSKVCHLSFKSLYKLIPHLEKGLDYKEAILCAGYNFRDENKRDKKLFLPVIQQETNPVVHRALTQARKVINAIIREYGSPNTIRFVVANDLAKTYKQRKELESTLKKNRAENEKIKTKLLSMGIINPTGMDIVKYKLWYEQSGICLYTGRQMELSSLFKPGYSIVNHIIPYNRSFDDTYHNRVLTLTETKYEKGNKIPFEYFGAEETCWNEYEKRVSTSKKIHDKKREKLLIRNFDIEYENEMISNNVFDTHYIGSYFEKYIDEHLQFKKSTKKQKVFSIHGNMVAHLHSRWGFNKNSREIYLNHAVDAAIVAVLTDQLIRNIADYYRRDNILEQKGSLKFPEPWKSFSIELEARISPQVRDLIKKLNLDSYLDVDILHIKPVFISKKPRRKVNGEAHKSTIRSLIGINEIGKTVTCIKTRLEDIPFDENGDFPMYGKDTDKYTYTAIKERYLEFNKDKEKAFSTPLYKLKRNGEPGNQIKSVKIIDTRNIVNKVNQGKGIAYNSNIIRVDVFSRDQKYYVVPIYLRDFIKGSLPNKIITAAKGFMQWPETDNSYTFLFSIFPNDLIKVVPKEGKFIKAKNENKENINLTEILGYFKGLDSSTGAFTLESHDGSLLARGIGTKNLLLIEKYQVDVLGRYNKVGNEERQDIKIQQN

SEQ ID NO: 818 - protein, 206 aa, Bacteroides cellulosilyticus
MKKILGLDLGCNSIGWALVNEAENTEEISSIIKLGVRVNPLTVDEMQNFEKGKSITTNADRTLKRSMRRNLQRYKLRRDTLIEVLKEHGFITDSTLLSEHGNKTTFETYRLRAKAAVEEISLEKFARVLLMINKKRGYKSSRKAKGSEDGVLIDGMDVARKLYEEGLTPGELCLQILEAGKKNLPDFYRSDLQNEFDRIWNFQKLV

SEQ ID NO: 819 - protein, 349 aa, Bacteroides coprosuis
MKKILGLDIGTNSVGWAVVNTNQEGEPSQIEKLGSRIIPMSQDILDKFGQGQTVSSTASRTDYRGIRRLRERSLLRRERLHRVLHILDFLPKHYADSIGWDPRNSKTYGKFLPGTEVKLAWVPTADGHQFLFYSTYLEMLEDLKQTQAQLFETSQTPVPLDWTIYYLRKKALTQPITKHELAWLLLHFNTKRGYYQRRGELEDTPTDKLVEYHALKVVDVEVDPEDQSKKPWYFVHLENGWIYKRQSSEPLDNWKGLVKEFIVTTHLDKEGKPKLDKEGEVRRSFSSPKEDDWTLVKKKTENDLEKSGLTVGAYIYQTLLNKPNQKIRGGLIKHIERNYYVEELEQILR

SEQ ID NO: 820 - protein, 1504 aa, Bacteroides coprosuis
MKKVLGLDIGTNSVGWAVVNQNDKGEFLSIEKIGSRIIPMSQDVMDKFGAGQTESSTAQRTQYRGVRRLRERSLLRRERLHRVLHILHFLPQHYDAAIGWNKKENKTYGKFLPGVEVNIPWVATDQGHQFIFMDSYAEMLKDLKQHQPHLFEKSSTPVPLDWTIYYLRKKALTQAISKEELAWILLNFNQKRGYYQLRGEEVEDNTKREEFYALKVVKVELDKDNTSAKTWYKVHLENGFIYPCPSDTPIDSWVGMVKDFIVTTTLEKDGSEKRTADGEIKRSFRAPKEDDWTLLKKKTESELEKSGKQVGAFIYDTLLSNPDQKIIGGLIKTIERKYYKKELEQILETQQKFIAELSDKKLFQACAEELYPLNDSHRENLLERDFKHLFVQDIIFYHRPLKTKKSLISNCTYEYRTFYKNGEKQISPIKCIAKSNPLFQEFRVWQFVQNLRILQRQRSEGDSIKYNVDVTAEFLKDENDIANLFTWLNERKVIKQDQLLKSYFKLKVNKETKELDYRWNYVDDKNKEYPCNATRTHILSFLEKCKEEKRIEDDRFVYSLWHLLYSVVEPIELRGALAKFAEREHLHPSFVDVFAQFPPLEKEYGSYSEKAIKRLLPLMRMGDYWHEDKIDVKTKQRIQRIIDGEADDDITHRSREKVENLRSITDFKGLPLWKAGYVVYNRHSESGELTKWKTPHELSNYIQNEFKQYSLRNPIVEQIVLETLRVVHDLWVKHGDFSEIHLELGRDIKNSSDKRKRMAERQQENENSRQRVLEMLIDLKKEAAFADLNPYSPSQQEKLRIVEDGVLRSNIEIPKDIEKITKSAKPTSRELTKYRLWLDQKYRSPYTGQPISLAQLFTSKYEIEHVIPQAKYFDDSFTNKVICESEVNKEKGSMLAHEFILKNGGSTVNVGGRQVQVLKNDAYVELINRLYGKNNPVKAKKLLAEDIDEVVGDFSERQLNDTRYISRVVQKLLSNIVREEDEQESTSKHVIGCSGQVTTALKKDWGLNDIWNKIIQPRFERLNEMTATEDYGVWQSPNHFQIRVPEEIQKGFTKKRIDHRHHAMDALVIACATRSHINYISNRSGQDRNAKFETTRTDLRSKLCYKENSSGNNYNYIFNKPWDTFTQDAHRALENIVVSHKQNLRVLTKTNNYTQFINKDGKKDLQKQVKGDHFAVRKPMHQETIYGRVSIRSIKEVALKKALENWKQIVDRTLKDKIRELIGAYGKYDAQTILKYFKDRDYKFNNLKINRVEVYEYDHNCAAVRKSIGDDLTIKQIERITDESIRKILMNHLSNYDDNLKEAFSPEGLMEMNKNIKELNGGKNHQPIYKVRLFEDLGSKFPLGVSHNNPDKYAIAAKGTNLFFGIYEDQEGKRMFDSIPLNIVIDRLKEKKSPVPETYNESKLKFHLSPNDLVYVPTDEEQKQPELVDVDHLSDEQKGRVYKAVSFTGNRAFFVNHRVSKVIHDYVEFGTKNKIENDDDKRSLKHICWKLKVNRLGEITDVKR

SEQ ID NO: 821 - protein, 1509 aa, Bacteroides eggerthii
MKTILGLDLGTNSVGWAVINSVIKEQAERIWIEMAGSRIIPMDAAVLGDFDKGNSISQTSERTRLRGARRLRERQLLRRERLHKVLNILGFLPNHYLEYIDFEKHPGKFLADAEPKLAWVKDEQGKYTFLFQAAFDEMLADFAIHQPSLVSGDKKIPYDWTIYYLRKKALTEMISKEELAWILLNFNQKRGYYQLRGEEEEDNAGKSVEFYALKVLTVEATDEKKGRDVWYNVHLENGWIYRRSSSVPLDWEGQVKEFIVTTDLNPDGTPKLDKYGEVKRSFRAPKEDDWMLIKKRTEADIANTHKTVGAYIYDTLLQKPQQKIIGKLVKTVERKLYRDELSLILQKQCAFHAELQDRALYARCVEALYPSNEVRRKNIANRDFVYLLMDDILFYQRPLKTKKSLIANCPYEENEYVDRETGEIKKTPLKCIAKSHPLFQEFRLWNFLSNIRIYQKEKEINGTLHLDVDVTAEFLKTEDDYVALFDWLNSRKEIEQKTFLKYPKFGLKKEISNYRWNYVEDKQYPCNETRHAILSSLEKANVCIDFLSNEKEVALWHILYSVSDKQEIEKALRTFAAKNGLDESFVEAFKKFPPFKSEYGAYSAKAIKKMLPLMRCGKYWDVSSIDDTTKERIKKIVTGEYDERISVKVRDKVMNLSDISCFRRLPLWLACYIVYNRHSEDKEAVKWESPADIDAYLASFKQHSLRNPIVEQVITETLRVVRDIWKQVGRIDEIHIELGREMKNPADKRKRMTAQILENENANLRIKALLAEFMNPEYEIENVRPYSPSQQEILRIYEDTVLHAEDQLPEEIDAILKKFNSSKVPTKSEFLRYKLWLEQKYRSPYTGELIPLGKLFTAAYEIEHVIPQSRYFDDSFSNKVICESAVNKLKDNQLGYEFIKNHHGQKVEVGFGKSVEIFSVDSYERFVKEQYAKSAVKMKKLLMDDIPEQFIERQLNDSRYISKVIKGLLSNIVREKNDSGEYEPEAVSKNIVVCTGSVTDRLKRDWGMNDVWNSIVYPRFERLNSLTDTQSFGHWENKSGKKVFQTELPLEYQKGFSKKRIDHRHHAMDAIVIACATRNHVNYLSNESASRNAKISRYDLQRLLCDKNRTDDNGNYKWVIKKPWDTFTQDAREVLSKIVVSLKQNLRIINKTTNVYRHLDATGNRVYEKQKTGDSWAIRKPMHKDTVFGAVNLRKVKVVRLSVALDTPAMIVDKRVKNKVFELLSYKYDKKRIEKYFKENAFLWKELDLAKVAVYYFTEATTEPLVAVRKPLDSTFNEKKIKESVTDTGIQKILLNHLCTKEGKPDLAFSAEGIEEMNRNLLQLNNGKSHQPIYKVRVYEPRGNKFSVGVLGNKGTKWVEAAKGTNLFFAIYITEDGKRTYETIPLNVVIEREKQGLVPVPDRNKKGDKLLFWLSPNDLVYLPTEEEREFGRINEPIDRGRIYKMVSCTGNEGHFIPANVANPIVPVIELGSNNKAQRAWTNEMIKDICIPIKVDRLGHIIEVKYRIDE

SEQ ID NO: 822 - protein, 1526 aa, Bacteroides faecis
MKKILGLDLGTNSIGWAVLNAADDNSLKYIEAAGSRIIPMDAAILGDFDRGNSISQTAERTRIRGMRHLRERYLLRRARLHRILNLLGFLPFHYAQDIDRYGNFSADMEPKIAWCKNLEGELEFIFIESFNEMLEDFRKNQPELVADNKKVPYDWVIYYLRKKALEKKISKEELAWILLNFNQKRGYYQLRGEDDDESMKTAKTRQYFDKQIIKNIIDTNQTYKGQRILIVELQNGDKGKIFKKEIPDWIGQEKNIIVTVDIDKDGNDKYEESGSLSCRFKIPTDAEWESEWKLIKMKTQKDLDESNKTVGTYIYDSILQNPTQKVRGKLVRTIERKYYKAELKQILEKQTEFHSELQDKDLYIECLNELYSNNDTHRNAITDRDFVYLFMNDILFYQRPLKSKKSLIDNCPYERNIYIDKETGEIKYSPIKCIAKSHPLFQEFRLWKFISSIRIYQRESVVEVVDKQLDLFSSQSTSVQKLVTDVDVTDKFLTCENDYVALFEWLNKKKIIDQKEFLKYRPFGLKGDIDNYRWNYVEDKSYPCNETHAMILTYFAKAGISEDILTKEMEEALWHILYSVEDRQEITKALRTFASKYHLSDSFVKVFSNIPPFKKEYGSYSAKAIKKLLSLMRMGKYWSEDAIDVNTRERIDKIVTGEYDEKIRDRVREKTIRLNDIRHFRALPDWLACYVVYDRHSETREITEWKSPEEIDEYIRNFKQHSLRNPIVEQVITETLRTVRDIWKQVGCIDEIHVELGREMKNPADKRKRITSQIIENENANLRVKALLTEFVNSEFEIENVRPYSLSQQDILRIYEDGVLNSVAEVPGDIAGILKKFNENDAKKRPTTSEILRYKLWLEQKYRSPYTGEMIPLSKLFTSAYEIEHVIPQSRYFDDSFSNKVICEAEVNKLKDNALGYEFIKKHHGEKVELGFGKIVEIFSVSVYEQFVKDNYSRNRGKMKKLLMDEIPEQFIERQLNDSRYISKVVKTLLSNVVREKAEQEAVSKNVIVCTGGVTDRLKKDWGINDVWNKIVLPRFLRLNELTNSTNFTAKNAAGNEIPAMPLELQKGFNKKRIDHRHHAMDAIVIACANRNIVNYLNNESASRKAKISRHDLQAILCDKVRTDDKGNYQWRVKKPWDTFTQDVYVALENIIVSFKQNLRVINKTSNYYWHYENGKKVLVKQVKGDSWAIRKPMHKDTVFGEVNLRKVKSVSLNEALKNPQFIVEKDLKRQLLSLLQQNFDIKKIKKYFEEHKDIWSDISLSKMNIYYFTKETKDRYFATRKPLDASFDKKKIESCITDTGIQQILLRHLELKENDPERAFSPDGIDEMNRNIIQLNKGKGHHPIAKVRVYEKADKFEVGQRGNKSSKFVEAAKGTNLFFAVYETEYPDEKTNSIVRKRNYATIPLNIAIERQKRGLSTAPEDEKGNVPSFVLSPNDLVYLPTSEDIVNGHITQPIDKSRIYKMVSSSGSQCFFIKHNIANIIVDKYEFSPLNKMERAISNEMIKEICIPVKVDRLGNIVKLGKSE

SEQ ID NO: 823 - protein, 1509 aa, Bacteroides fluxus
MKTILGLDLGTNSVGWAVINSVIKEQAERIWIEMAGSRIIPMDAAVLGDFDKGNSISQTSERTRLRGVRRLRERQLLRRERLHKVLNILGFLPNHYLEYIDFEKHPGKFLSDAEPKLPWVKDEQGKYTFLFQAAFDEMLADFAIHQPSLVSGDKKIPYDWTIYYLRKKALTEMISKEELAWILLNFNQKRGYYQLRGEEEEDNAGKSVEFYALKVLTVEATDEKKGRDVWYNVHLENGWIYRRSSSVPLDWEGQIKEFIVTTDLNPDSTPKLDKYGEVKRSFRAPKEDDWMLIKKRTEADIANTHKTVGAYIYDTLLQKPQQKIIGKLVKTVERKLYRDELSLILQKQCAFHAELQDRTLYARCVEALYPNNEVQRRNIANRDFVYLLMDDVLFYQRPLKTKKSLIANCPYEENEYVDRETGEIKKAPLKCIAKSHPLFQEFRLWNFLSNIRIYQKEKEINGTLHLDVDVTAEFLKTEDDYVALFDWLNSRKEIEQKTFLKYPKFGLKKEISNYRWNYVEDKQYPCNETRHAILSRLEKANVCIDFLSNEKEVALWHILYSVSDKQEIEKALRTFAAKNGLDESFVEAFKKFPPFKSEYGAYSAKAIKKLLPLMRCGKYWDVSSIDDTTKERIKKIVAGEYDERIAVKVRDKVMNLSDISCFKRLPLWLACYIVYNRHSEDKEAVKWESPADIDAYLASFKQHSLRNPIVEQVITETLRVVRDIWKQVGRIDEIHIELGREMKNPADKRKRMTAQILENENANLRIKALLAEFMNPEYEIENVRPYSPSQQEILRIYEDMVLHAEDQLPEEIDAILKKFNSSKVPTKSEFLRYKLWLEQKYRSPYTGELIPLGKLFTAAYEIEHVIPQSRYFDDSFSNKVICESAVNKLKDNQLGYEFIKNHHGQKVEVGFGKSVEIFSVDSYERFVKEQYAKSAVKMKKMLMDDIPEQFIERQLNDSRYISKVIKGLLSNIVREKNDSGEYEPEAVSKNIVVCTGSVTDRLKRDWGMNDVWNSIVYPRFERLNSLTDTQSFGHWENKSGKKVFQTELPLEYQKGFSKKRIDHRHHAMDAIVIACATRNHVNYLSNESASRNAKISRYDLQRLLCDKSRTDDNGNYKWVIKKPWDTFTQDAREVLSKIVVSLKQNLRIINKTTNVYRHLDATGNRVYEKQKTGDSWAIRKPMHKDTVFGAVNLRKVKVVRLSVALDAPTMIVDKRVKNKVFELLSYKYDKKRIEKYFKENAVLWKELDLARVAVYYFTEATTEPLVAVRKPLDSTFNEKKIKESVTDTGIQKILLNHLCTKEGKPDLAFSAEGIEEMNRNLLQLNNGKRHQPIYKVRVYEPRGNKFSVGVLGNKGTKWVEAAKGTNLFFAIYITEDGKRTYETIPLNMVIEREKQGLAPVPDKNEKGDKLLFWLSPNDLVYLPTEEELEFGRINEPIDRGRIYKMVSSSGNQCFFIPQSISNAIIPTKELGANNKAERSWDGAMIKNICIPVKVDRLGRIIEVKYRINE

SEQ ID NO: 824 - protein, 1436 aa, Bacteroides fragilis; identical to SEQ ID NO: 155

SEQ ID NO: 825 - protein, 1512 aa, Bacteroides nordii
MKNILGLDLGTNSIGWAVINSEEDGPIVKKRIELAGSRIIPMDAAVLGNFDSGVTKSQTAERTSFRSIRRLRERQLLRRERLHKVLQILGFLPEHYVNDIDFENHPGKIKRNTEPKLPWRKNSMGQFEFIFQDSFEAMLTDFATHQPVFVSEGKKVPYDWTLYYLRKKALTEGISKEELAWLILNFNQKRGYYQLRGEEEEEQSNKLVEFYALRVVKVEATDDKKGKDTWYNVHLENGWIYRRTSNIPLDWEGKVKEFIVTTDLNEDGTPKLDKYGEVKRSFRAPKEDDWTLIKKKTESDIANSHKTVGCYIYDALLQNPHQKIKGRLVRTVERKFYKEELRLILEKQLSFHPELQDRDLYRACIDALYVSNEAHKNNISGRDFVYLFIDDIIFYQRPLKTKKSLIDNCPYEENQYMDRETGEVKQAPIKCIAKSHPLFQEFRLWQFISNIRIYQRERVLDDGKLETDVDVTPDFLKTEDDYTTLFEWFNDRKEVDQKAFLKNPQFGLKKTFTEYRWNYVEDKSYPCNETRNAILNGLQKAGVSADFLSREVEEALWHILYSVEDKIEIESALRKFASKHDLDDRFADVFKKLPPFKKEYGAYSAKAIKKLLPLMRIGKYWELSNIDDKTKERIDKIITGEWDENIHDRVREKAIKLSDITDFKGLPLWLSCYVVYNRHSEARAIAKWESPEDIDSYLRLFRQHSLRNPIVEQVITETLRTVRDIWKRVGQIDEIHVELGREIKNPADKRAKMTAQIVENENTNLRIKALLAEFINSEYEIENVRPYSSNQQEKLKIYEDTVLNGVKEIPEDINTILKKFRESDLKKRPTKSDFLHYKLWLEQKYCSPYTGRIIPLGKLFTSAYEIEHIIPQAHYFDDSFSNKVICEAEVNGLKDKKLGYEFIKHNPGKMVEIGFGKPPVRIFSVEEYERFVKENYSGIKNKMNKLLMDDIPETFIERQLNDSRYISKVVKSLLSNIVREKDSNGEYEPEAISKNVIVCTGSVTDRLKRDWGVNDVWNSIIYPRFERLNELTGSQQFGCWENKEGKRVFQTAVPLEMQKGFSKKRIDHRHHAMDAIVIACATRNHINYLSNESASKKAKISRTDLQRLLCTKCRTDDNGNYKWIVKKPWPAFTQDIRKALENITVSFKQNLRVINKTTNYYVHFDESGKKVLEKQINGDSWAIRKPMHKDTVFGKVNLQKVKEVRLSLALDTPKMIVDKKLKEKVLQLYSYKYDKKRIDKYFKENASLWKDLNLSKVAVYYFTNDSTEPLVAVRKPLDTSFNAKKIKESVTDTGIQKILLNHLSNNQDDPNLAFSPDGIDKMNKNLTALNDGKYHQPIYKVRVCEPQGNKFSVGTSGNKTSKYVEAAKGTNLFFAVYQTEDGKRSYETIPLNVVIEREKLGWTPVPENNNNGDKLLFWLSPNDLVYVPTADELNNGMRLDNMDKGRIYKMISCSGPQCFFIPQNVSNAIIPVIELGANNKAEKSWNNEMIKVVCVPIRVDRLGCITQINNQK

SEQ ID NO: 826 - protein, 779 aa, Bacteroides oleiciplenus
MKEGNQYDVACEYAGYRHSKSSLTREEIDNKVLKNRLEILPKNSLRNPVVEKILNQMVNVVNAVIDTYGKPDEIRVELARELKKGAKEREELAKSIAQNTREHEAIRQLLQTEFGMMHVTRNDIIRYKLYEELKDNGYKTLYSDQYIPREKVFSKEIDIEHIIPQARLFDDSLSNKTLEYRAVNIEKGNKTAYDFVKEKYGNDGLRRYLNHCEALFKDKKTKLKKLKMEDQDIPDGFIDRDLRNTQYIAKKALSMLSEISRRVVATTGSITDELRKDWQLVDIMKELNLPKYEALGFVETFKDKDGRIIKKIKDWSKRNDHRHHAMDALTVAFTKDVFIQYFNNKNAFWMSGSKEHANITAIKNKYFEKGKALAPIPLELFRTEAKHHLENILVSIKAKNKVVTNNINRTKKKNGENLKLQQTPRGQLHLESIYGSYRQCIIRDEKVNASFDASKIANVSKSAYRNALLKRLEAYDNDPKKAFTGKNSLDKNPVYLDENKMEKVPDRVKIVEFETVYTIRKPIDPKLSIDKVVDARIRTLLKKRLEEYGGDAQRAFSNIEENPIWLNKEKGISVKRVAIRGISNAQALHDKKDKDGNPILDKEGKGIPTDFVNTSNNHHVAIYRKPVVDKMGQVILDENGSPRYELGEDVISFFEAVARVNLRQPVVDKDYKRSEGWQFLFSMKQNEYFVFPNEKTGFNPKEIDLLNPENYALISPNLFRVQKIGLNDYTFRHHLETSIQNNSNELKFITWIRCGKNGINGVIKVRVNHIGQIVSMGEY

SEQ ID NO: 827 - protein, 653 aa, Bacteroides oleiciplenus
MKKILGLDLGSSSIGWALVNEGANDEEKSSIIKLGVRVNPLTVDEAQNFEKGKSITTNADRTLKRGMRRNLQRYKQRREALVEVLKKHEFITAGTLMSEQGNKTTFETYRLRAKAVEEEISLEEFARVLLMINKKRGYKSSRKAKGDEDGVLIDGMDVAKKLYDEDLNPGELCLQLLEAGKKTLPDFYRSDLQDEFDKIWNFQKQFNPESFCDTAKEEVRGKNRTQTWTILSKYFVWTEGDSVWNNEEARTEERIKEYKLVGIKRTTKGYEQKLENYRWRVQALSEQLNPEIIAIVLQEINGQISASSGYLGAISDRSKELFFNHQTVGQSLMSELDKNPNGSLRNKVFYRQDYLDEFNTIWEKQSLYHKELTVELKKEIRDIIIFYQRRLKSQKGLISTCEFEQREIIVEKDGKRKTKIIGCKVIPRSHPLFQEFKIWQTLNDVEVYVADRRTKRKQDRKSTTLFSDTEDILLVEGKRYLYQEEKELLAKELFVRENMKKAEVLKLLFEDPKELDLNFKQIDGNRTGFALFSAYSKMIEKYGYESVNFKNSADEIIEKLQIIFADLGWNTELFSIDLSKDDKELEKQPYFRLWHLLYSFEGDNTPTGNGKLIEALMRLCSVEKEYASVLANVSFQEDYGSLSAKAIKKYYLI

SEQ ID NO: 828 - protein, 1436 aa, Bacteroides sp.
MKRILGLDLGTNSIGWALVDEAENKDERSSIVKLGVRVNPLTVDELTNFEKGKSITTNADRTLKRGMRRNLQRYKLRRETLMEVLKEHKLITEDTILSENGNRTTFETYRLRAKAATEKISLEEFARVLLMINKKRGYKSCRKAKGAEEGTLIDGMDIARELYNNNLTPGELCLQLLDAGKKYLPDFYRSDLQNELDRIWEKQKEYYPEILTEVLKEELRGKKRDAVWAICAKSFVWEEYYTEWNKEKGKTEQQEREHKLEGIYSKRKRDEAKRENLQWRVNGLKEKLSLEQLVIVLQEMNIQINNSSGYLGAISDRSKELYFNKQTVGQYQMEMLDKNPNASLRNMVFYRQDYLDEFNTLWEKQAEYHKELTGELKKEIRDIVIFYQRRLKSQKGLVGFCEFESRQIEVEIDGKKKIKTVGNRVIPRSSPLFQEFKIWQILNNIEVTVVGKKGKRRKQKDNSPTLFDGLDDTEQLELNGSRYLYQEEKELLAQELFVRDKMTKSDVLKLLFDNPQELDLNFKTIDGNKTGYTLFQAYSKMIEMSGHEPVDFKKTVEKVVEHVKAVFDLLNWNTDILGFNSNEELDNQSYYKLWHLLYSFEGDNTPTGNARLVQKITELYGFEKEYAIILANVTFQDDYGSLSAKAIHKILPHLKEGNRYDVACAYAGYKHSESSLTKEEIANKALKDRLTLLPKNNLRNPVVEKILNQMVNVINAIIDTYGKPDEIRVELARELKKNAKEREELTKFIAETTRKHEEFKILLQSEFGLTNVSRTDILRYKLYKELESCGYKTLYSNTYIPREKLFSKEFDIEHIIPQARLFDDSFSNKTLEARSINLEKGNKTAYDFVKEKFGESGADNSLDHYLNNIEDLFKSGKISKTKYNKLKMAEQDIPDGFINRDLRNTQYIAKKALSMLNEISRRVVATSGTITDKLRQDWQLVDVMKELNWEKYKALGLVEYFEDKDGRQIGRIKDWTKRNDHRHHAMDALTVAFTKDIFIQYFNNKNASLNSNTNEYAIKNKYFQNGRAIAPIPLREFRVEAKKHLENTLISIKAKNKVVTGNINKTKKRGGVNKYLQQTPRGQLHLETIYGSGKQYLTKEEKVNASFDMKKIATVSKSAYRDVLLKRLHENDNDPKKAFTGKNSLDKQPIWLDKEQTRKVPEKVKTVTLETIYTVRKEISPDLKVDKVIDAGVRKILTGRLNEYGNDAKKAFSNLDENPIWLNKEKGISIKRVTISGISNAQSLHVKKDKDGKPILDEDSRNIPVDFVNTGNNHHVAVYRRPVIDKRGQLVIDEAGNPKYELEEVVVSFFEAVTRANLGQPIIDKDYKTSEGWQFLFSMKQNEYFVFPNEKTGFNPKEIDLLDAENYGVISPNLFRVQKFAHKNYVFRHHLETTIKDTSSILKGITWIDFRSSKGLDAIVKVRVNHIGQIVSVGEY

SEQ ID NO: 829 - protein, 1510 aa, Bacteroides sp.
MKRILGLDLGTNSIGWALVDSEEQRILGMGSRIIPMDQGVLDTFSGGNPVETQTAARTAYRGTRRLRERALLRRERLIRVLNMMKFLPEHYASQIDFEKRLGQFFDEKEPKLAWKQNDEGRFEFIFQQSFNEMIEEFKNKGVVREDKKIPYDWTIYYLRKKALSQEIEKEELAWILLNFNQKRGYYQLRGEEEEENPNKLVEYYSLKIVDVIADEKPNSKGDIWYSLHLENGWIYRRSSKIPLFGWKDKTRDFIVTTDLNDDGTVKKDKEGIEKRSFRAPSENDWVLLKKKTESDIEKSHKTVGAYVYETLLQNPMQKVRGKLVRTIERKFYKDELKQILEKQREFHPELRDEDLYNDCVRELYRSNETYQFILSKRDFVHLFLDDILFYQRPLRSQKSAIGDCILEFKTYKDKDGNNIKEYLKVISKSNPLYQEFRIWQWLYNLKIYRKEDDEDVTLQFIANIEDKEQLFDFLSNRKSIEQKPLLEYLIKAKGLKKQVKTEAYRWNYVEDKIYPCSETKTMISTRLAKVENIPDNFFTKEIEQKLWHIIYSVTDKNEFEKALRTFAKKYDLDIASFVDNFKKIPPFKNEYGSFSEKAIKKLLPLMRLGKYWKWNDIDNNTQNRISKIITGEYDEEIKDIVREKSIALTNENDFQGLQLWLAQYLVYGRHSEADIAGKWHSVADLEKYLNEFKQHSLRNPIVEQIITETLRVVRDIWRKYGQGAENFFSEIHVELGRDMKNTADERKKIVNVVTENENTNLRIKALLMELKNNSDGKLEVENVRPYSPTQQDILKIYEEYAISTGLDNEKDEKVKEDIKKISRVAQPTTTELQRYKLWLEQKYCSPYTGKVIPLGKLFTEEYQIEHIIPKSRYYDDSFSNKVICEAAVNKLKDKCLGLEFIKNYHGQIVETGFGQKVTIFDEEAYQNFVKQHYAYNRSKRTKLLLEEIPEKMIERQMNDTRYISKFVLPLLSNLVRAEENDNGVNSKNVLPVNGKITTMLKQDWGLNDVWNDLILPRFVRMNELAKTIAFTSWNEQHQKYLPTVPLELSKGFQKKRIDHRHHAMDALVIACATRDHVNLLNNKHANTDTIRYDLQRKLRLFERVTYIDPQTKNNVTKDIPKEFKKPWDNFTVDARNELEKIIVSFKQNLRIINKATNIYTKYENGKKIKVGQKGLNWAIRKPLHKETVFAKVSLRKRKTVRLSEALKDWKKIVDKKLKQEIKRLTCQYGKFDVDTILRYFKDRKYQFGEVDVSKVKMYYFDEENAAVRKNVDTSFTEKFIQGSVTDTGIQKILLNHLEAKGNKVEIAFSPEGIEEMNKNIIQLNEGKLHLPIFKVRVYETIGNKFSVGVKGNKKDKYVEAAKGTNLFFAIYVDENGIRSYETIPLNIVIERLKQGLSVVPEKNRKEHSLLFYLSPNDLVYVPIEDERENIHAVNLDQLNNEQRKRIYKMVSCTGSECHFVPYYVASPIVNKVEYSSLNKIGRSLTGEMIKDVCIKLKVDRLGNVKGISGL

SEQ ID NO: 830 - protein, 1436 aa, Bacteroides sp.
MKRILGLDLGTNSIGWALVNEAENKDERSSIVKLGVRVNPLTVDELTNFEKGKSITTNADRTLKRGMRRNLQRYKLRRETLTEVLKEHKLITEDTILSENGNRTTFETYRLRAKAVTEEISLEEFARVLLMINKKRGYKSSRKAKGVEEGTLIDGMDIARELYNNNLTPGELCLQLLDAGKKFLPDFYRSDLQNELDRIWEKQKEYYPEILTDVLKEELRGKKRDAVWAICAKYFVWKETYTEWNKEKGKTEQQEREHKLEGIYSKRKRDEAKRENLQWRVNGLKEKLSLEQLVIVFQEMNTQINNSSGYLGAISDRSKELYFNKQTVGQYQMEMLDKNPNASLRNMVFYRQDYLDEFNMLWEKQAVYHKELTEELKKEIRDIIIFYQRRLKSQKGLIGFCEFESRQIEVDIDGKKKIKTVGNRVISRSSPLFQEFKIWQILNNIEVTVVGKKRKRRKLKENYSAIFEELNDAEQLELNGSRRLCQEEKELLAQELFVRDKMTKSEVLKLLFDNPQELDLNFKTIDGNKTGYALFQAYSKMIEMSGHEPVDFKKPVEKVVEYIKAVFDLLNWNTDILGFNSNEELDNQSYYKLWHLLYSFEGDNTPTGNGRLIQKMTELYGFEKEYATILANVSFQDDYGSLSAKAIHKILPHLKEGNRYDVACVYAGYRHSESSLTREEIANKVLKDRLMLLPKNSLHNPVVEKILNQMVNVINVIIDIYGKPDEIRVELARELKKNAKEREELTKSIAQTTKANEEYKTLLQTEFGLTNVSRTDILRYKLYKELESCGYKTLYSNTYISREKLFSKEFDIEHIIPQARLFDDSFSNKTLEARSVNIEKGNKTAYDFVKEKFGESGADNSLEHYLNNIEDLFKSGKISKTKYNKLKMAEQDIPDGFIERDLRNTQYIAKKALSMLNEISHRVVATSGSVTDKLREDWQLIDVMKELNWEKYKALGLVEYFEDRDGRQIGRIKDWTKRNDHRHHAMDALTVAFTKDVFIQYFNNKNASLDPNANEHAIKNKYFQNGRAIAPMPLREFRAEAKKHLENTLISIKAKNKVITGNINKTRKKGGVNKNMQQTPRGQLHLETIYGSGKQYLTKEEKVNASFDMRKIETVSKSAYRDALLKRLYENDNDPKKAFAGKNSLDKQPIWLDKEQMRKVPEKVKIVTLEAIYTIRKEISPDLKVDKVIDVGVRKILIDRLNEYGNDAKKAFSNLDKNPIWLNKEKGISIKRVTISGISNAQSLHVKKDKDGKPILDENGRNIPVDFVNTGNNHHVAVYYRPVIDKRGQLVVDEAGNPKYELEEVVVSFFEAVTRANLGLPIIDKDYKTTEGWQFLFSMKQNEYFVFPNEKIGFNPKEIDLLDVENYGLISPNLFRVQKFSLKNYVFRHHLETTIKDTSSILRGITWIDFRSSKGLDTIVKVRVNHIGQIVSVGEY

SEQ ID NO: 831 - protein, 1424 aa, Bacteroides sp.
MKRILGLDLGTNSIGWALVNEAETDEEVSSIIRLGVRVNPLTVDETQNFEKGKSITTNAERTLKRSMRRNLQRYKLRRDALVEFLKELGFITDETILSEQGNRTTFETCRLRAKAAEEEISLEELSRVLLMINKKRGYKSSRKVKKEEDGVLIDGMEIAKKLYEEDLTPGQLCSQLLESGKKVLPDFYHSDLQEELDRIWSVQKQFHPDVFCDAAKEEIKGKNRSQTWAILANYFVWKEEVVGWNDREAKNETIEKECKLVGLKRTTKGYELKKENYRWRAQALTEQLGLEEIAVVLQEINGQINASSGYLGAISDRSKVLYFNHQTVGQYQMAELDKNPHASLRNMVFYRQDYLDEFDRIWEKQAEFHKELTAELKKEIRDMIIFYQRRLKSQKGLISFCEFERLEIVVEKDGKKQTKVIGCKVIPRSHPLFQEFKVWQTLNDIKVLGREKKRNALSASESRALYPEEKEILARELAIKENMKKADVLKLLFENPQELDLNFKQIDGNRTGFSLFSAYSKMIEKYGYEPLDFKKPADEIIGQLRTIFTDLGWNTNLFTIDLTKEGKELEMQPYFRLWHLLYSFEGDNTSTGNGKLIEKIMQLCGVEKEYAVELASLSFQDDYGSLSAKAIKRILPYLKEGNLYDVACEYAGYRHSKSSLTKEEIENKVLKGKLEVLPKNSLRNPVVEKILSQMVNVINTIIDTYGKPDEIRVELARELKKSAKEREELTKAIAKSTREHEEIRKLLQDEFGMMNVSRNDIIRYKLYEELKDNGYKTLYSNQYIPKEKIFSKEIDIEHIIPQSRLFDDSLSNKTLEYKAINIEKGNKTAYDFVKEKYGEEGLQQYINRCESLFNDKKAKLRKLKMEQKDIPDGFIDRDLRNTQYIAKKALAMLNEICRRVVATTGSITDQLREDWQLVDVMKELNLPKYEALGFVETYEDKDGRKIKRIKDWTKRNDHRHHAMDALTVAFTKDAFIQYFNNKNAAQDSGNRNHTNIIGIKTRYFDKGRALPPIPLEQFRIEAKQHLEKLLVSIKAKNKVVTVNVNRTKKRKGENTKIQQTPRGQLHLETVYGSHKQYVTKIEKVNASFDAAKIATVSKRAYRNALLKRLETFGNDPKKAFTGKNALEKNPLYADKYQTIRVPEKVQTVEFETIYTIRKPVDPALNVDKVVDVKVRAILERRLKEYGGDPKKAFVNFWENPIWLNKEKGISIKRVSIRGINNAQSIHVKKDKNGNPIWDENGKQIPVDFVNTGNNHHVAIYRKPVLDKKGQVTFDEDGNLMYELDEVVVPFFEAVTRANLGLPIIDKDYRKSEGWQFLFSMKQNEYFVFPNEKTGFNPKEVDLLNPDNYAMISPNLFRVQTMSKVMYGNNVVRDYKFRHHLETTVKDMKELKDIAYKQYKTLSFGNSVVKIRINHIGQIVSVGEY

SEQ ID NO: 832 - protein, 1055 aa, Bacteroides sp.
MRIYRKDLAQDVDVTNELLKTEEDYVALFDWLNGKKEIDQKAFLKYPLFGLKKEVENYRWNYVQDKPYPCNETRSSMLARLEKCDISIEFLTKENEEALWHILYSVEDKNEIVKALQKFADKHDLNASFVDVFQKFPPFKKEYGSYSAKAIKKLLPLMRMGKYWSENSIDKGTRERMDKIITGEYDEKIENRVREKAIHLADVSDFKGLPLWLVCYIVYGRHSEAKEITQWKSPADIDLYLRSFKQHSLRNPIVEQIIIETLRVVRDIWKQVGNIDEIHVELGREMKNPADKRKKMTQQMSENENTNLRIKYLLTEFLNPEYEVENVRPYSPSQQDILRIYEEGVLNSVSDLPEEISDILKKFTETDLKKRPSRSEVLRYKLWLEQKYRSPYTGEVIPLGKLFTPAYEIEHVIPQSCYFDDSFSNKVICEAEVNKLKSNLLGHEFIVKHHGEIVELPFGKKVRIFTVDEYEQFVKDNYSRTRSKMKKLLMDDIPEEFVARQLNDSRYISKVVKSLLSNIVREKGEEEAISKNVIPCTGGVTDRLKKDWGINEVWNKIILPRFQRLNELTGTNKFTTKNVGIQEIPTMPLELQKGFNKKRIDHRHHAMDAIIIACANRNIINYLNNESATAKAELSRYDLQKMLCDKAKTDNNGNYKWVIRKPWASFTQDTYLALENIIVSFKQNLRVINKATNHFLHYNEEGKKIFVKQGKGDNWAIRKSMHKDTVFGEVNLRRIKTVALNEAMKNPQSIVVKDFKRKLLELWNLGFDAKRIKKYFEDNRETWSDINLSKIEVYYFSKDTKDRFFATRKPLDTSFDRKKIENNITDTGIQKILLRHLELKDNNPDIAFSPDGIDEMNRNIIQLNNGKYHQPIIKVRWYEQADKFAVGQTGNKSSKFVEAAKGTNLFFAVYESNILDKKTNTIIKKRNYATIPLNVAIERQKQGLPVAPEDENGNDPIFVLSPNDLVYLPTAADLANGIIAQPLDRGRIYKMVSCTGNEGYFIPARIANPILQTIELGSNNKAQKAWTDEMIKEICMPIKVDRLGNVLESSSSYKK

SEQ ID NO: 833 - protein, 1055 aa, Bacteroides sp.
MRIYRKDLAQDVDVTNELLKTEEDYVALFDWLNGKKEIDQKAFLKYPVFGLKKEIENYRWNYVQDKPYPCNETRSLMLARLEKCDISIEFLTKENEEALWHILYSVEDKNEIVKALQKFADKHDLNASFVDVFQKFPPFKKEYGSYSAKAIKKLLPLMRMGKYWSENSIDKGTRERIDKIITGEYDEKIENRVREKAIHLADVSDFKGLPLWLVCYIVYGRHSEAKEIIQWKSPADIDSYLRSFKQHSLRNPIVEQIIIETLRVVRDIWKQVGNIDEIHVELGREMKNPADKRKKMTQQMSENENTNLRIKYLLTEFLNPEYEVENVRPYSPSQQDILRIYEEGVLNSVSDLPEEISDILKKFTETDLKKRPSRSEVLRYKLWLEQKYRSPYTGEVIPLGKLFTPAYEIEHVIPQSCYFDDSFSNKVICEAEVNKLKSNLLGHEFIVKHHGEIVELPFGKKVRIFTVDEYEQFVKDNYSRTRSKMKKLLMDDIPEEFVTRQLNDSRYISKVVKSLLSNIVREKGEEEAISKNVIPCTGGVTDRLKKDWGINEVWNKIILPRFQRLNELTGTNKFTTKNVGIQEIPTMPLELQKGFNKKRIDHRHHAMDAIIIACANRNIINYLNNESATAKAELSRYDLQKMLCDKAKTDNNGNYKWVIRKPWASFTQDTYLALENIIVSFKQNLRVINKATNRFLHYNEEGKKIFVKQGKGDNWAIRKSMHKDTVFGEVNLRRIKTVALNEAMKNPQSIVVKDFKRKLLELWNLGFDAKRIKKYFEDNRETWSDINLSKIEVYYFSKDTKDRFFATRKPLDTSFDRKKIENNITDTGIQKILLRHLELKDNNPDIAFSPDGIDEMNRNIIQLNNGKYHQPIIKIRWYEQADKFAVGQTGNKSSKFVEAAKGTNLFFAVYESNILDKKTNTIIKKRNYATIPLNVAIERQKQGLPVAPEDENGNDPIFVLSPNDLVYLPTDDELANGIIAQPLDRGRIYKMVSSSGEQCFFIKHIVANVLVDKFEFSPLNKMERALTGEMIKMICIPIKVDRLGNVLESSSSYKK

SEQ ID NO: 834 - protein, 286 aa, Bacteroides uniformis
MLSYKYDKKKIEKYFKENAFLWKELDIAKVAVYYFTENTTEPLVAVRKSLDSTFNEKKIASVTDTGIQKILLNHLKSKEGKAELAFSAEGIEEMNRNLLQLNDGKGHQPIYKVRVYEPRGNKFKVGVLGNKGAKWVEAAKGTNLFFAIYITEDGNRTYETIPLNWVIEREKQGLVPVPDRNEKGDKLLFWLSPNDLVYLPTEEERDFGRINEPIDRGRIYKMVSSSGNQCFFIPQSISNAIISTKELGSNNKAEKSWDGEMIKNICIPVKVDRLGRIIEVKYRVNE

SEQ ID NO: 835 - protein, 1508 aa, Bacteroides uniformis
MRTILGLDLGTNSIGWAVINSVIKEQTERIWIEMAGSRIIPMDAAILGDFDKGNSISQTAERTRFRGVRRLRERQLLRRERLHKVLKILGFLPEHYLKGIDFEKHTGKFLSGSEPKLPWVKDRWGKYSFLFQTAFNEMLADFAKHQPSLVFDGKKIPYDWTVYYLRKKALTEMISKEELAWILLNFNQKRGYYQLRGEEEEDNAGKSVEFYALKVLSVEATDEKKGRDIWYNVHLENGWVYRRSSNVPLDWEGRVKEFIVTTDLNPDGTPKLDKYGEVKRSFRAPKEDDWMLIKKRTEADITGTHKTIGSYIYDALLQEPQQKIIGKLVKTVERKFYKEELNFILQKQCAFHAELQDRDLYMRCIEALYPGNEVQRRNIANRDFIYLLIDDVLFYQRPLKTKKSLIANCPYEENEYVNRKTGEIKTAPLKCIAKSHPLFQEFRLWYFLSNIRVYQKEREVNGTLHLDVDVTTEFLKTEDDYVALFDWLNSRKEIDQKAFLRYPAFGLKKEINNYRWNYVEDKFYPCNETRHAILSRLEKAGIGIDFLSDEKETALWHILYSVSDKQEIEKALATFAVKNGLNESFVEVFKKFPPFKSEYGAYSAKAIKKLLPLMRCGKYWDMSLIDGTTKERIERIIAGECDESIGAKVREKAMNLSDISCFKRLPLWLACYVVYNRHSEDKEITKWETPADIDAYLAAFKQHSLRNPIVEQVITETLRVVRDIWKQVGKIDEIRIELGREMKNPADKRKRMTTQILENENANLRIKALLAEFVNPEYGVENVRPYSPSQQEILRIYEDAVLKGEEQIPEDIDVILKKFNTSKLPTKSEFLRYKLWLEQKYRSPYTGELIPLAKLFTAAYEIEHVIPQSRYFDDSFSNKVICESAVNKLKDNQLGYEFIKNHHGQKVEVGFGKTVEIFSVDSYERFVKEQYAKSGIKMKKLLMDDIPEQFIERQLNDSRYISKVVKGLLSNIVREKNDSGEYEPEAVSKNILVCTGSVTDRLKKDWGMNDVWNSIVSPRFERLNALTETQCFGHWENKDGKKVFQTAVPLEYQKGFSKKRIDHRHHAMDAIVIACATRNHVNYLNNESASRNAKISRYDLQRLLCDKSRGDGNGNYRWIIKKPWTTFTQDAREALSGIIVSLKQNLRIINKTTNIYQHFDANGTRVYEKQKIGDSWAIRKPMHKDTVFGAVNLRKVKVVRLSVALDTPSMIVNKRVKNKVLELLSYKYDKKKIEKYFKENAFLWKELDIAKVAVYYFTENTTEPLVAVRKSLDSTFNEKKIASVTDTGIQKILLNHLKSKEGKAELAFSAEGIEEMNRNLLQLNDGKGHQPIYKVRVYEPRGNKFKVGVLGNKGAKWVEAAKGTNLFFAIYITEDGNRTYETIPLNWVIEREKQGLVPVPDRNEKGDKLLFWLSPNDLVYLPTEEERDFGRINEPIDRGRIYKMVSSSGNQCFFIPQSISNAIISTKELGSNNKAEKSWDGEMIKNICIPVKVDRLGRIIEVKYRVNE

SEQ ID NO: 836 - protein, 1210 aa, Bacteroides uniformis
MRTILGLDLGTNSIGWAVINSVIKEQTERIWIEMAGSRIIPMDAAILGDFDKGNSISQTAERTRFRGVRRLRERQLLRRERLHKVLKILGFLPEHYLKGIDFEKHTGKFLSGSEPKLPWVKDRWGKYSFLFQTAFNEMLADFAKHQPSLVFDGKKIPYDWTVYYLRKKALTEMISKEELAWILLNFNQKRGYYQLRGEEEEDNAGKSVEFYALKVLSVEATDEKKGRDIWYNVHLENGWVYRRSSNVPLDWEGRVKEFIVTTDLNPDGTPKLDKYGEVKRSFRAPKEDDWMLIKKRTEADITGTHKTIGSYIYDALLQEPQQKIIGKLVKTVERKFYKEELNFILQKQCAFHAELQDRDLYMRCIEALYPGNEVQRRNIANRDFIYLLIDDVLFYQRPLKTKKSLIANCPYEENEYVNRKTGEIKTAPLKCIAKSHPLFQEFRLWYFLSNIRVYQKEREVNGTLHLDVDVTTEFLKTEDDYVALFDWLNSRKEIDQKAFLRYPAFGLKKEINNYRWNYVEDKFYPCNETRHAILSRLEKAGIGIDFLSDEKETALWHILYSVSDKQEIEKALATFAVKNGLNESFVEVFKKFPPFKSEYGAYSAKAIKKLLPLMRCGKYWDMSLIDGTTKERIERIIAGECDESIGAKVREKAMNLSDISCFKRLPLWLACYVVYNRHSEDKEITKWETPADIDAYLAAFKQHSLRNPIVEQVITETLRVVRDIWKQVGKIDEIRIELGREMKNPADKRKRMTTQILENENANLRIKALLAEFVNPEYGVENVRPYSPSQQEILRIYEDAVLKGEEQIPEDIDVILKKFNTSKLPTKSEFLRYKLWLEQKYRSPYTGELIPLAKLFTAAYEIEHVIPQSRYFDDSFSNKVICESAVNKLKDNQLGYEFIKNHHGQKVEVGFGKTVEIFSVDSYERFVKEQYAKSGIKMKKLLMDDIPEQFIERQLNDSRYISKVVKGLLSNIVREKNDSGEYEPEAVSKNILVCTGSVTDRLKKDWGMNDVWNSIVSPRFERLNALTETQCFGHWENKDGKKVFQTAVPLEYQKGFSKKRIDHRHHAMDAIVIACATRNHVNYLNNESASRNAKISRYDLQRLLCDKSRGDGNGNYRWIIKKPWTTFTQDAREALSGIIVSLKQNLRIINKTTNIYQHFDANGTRVYEKQKIGDSWAIRKPMHKDTVFGAVNLRKALIPQHYNLTLFISS

SEQ ID NO: 837 - protein, 1504 aa, Bacteroides vulgatus
MKNIVGLDLGTNSIGWAVVNGSVNDDGSEQLVKIQASGSRIIPMDAAMIGDFNKGNSISQTAERTRLRGVRRLSERYLLRRERLHRILDILGFLPFHFAQDLDRHGKIVKGKEPKLAWRKNEAGQFEFIFQDSFKEMLEDFKLNHPNLITDDKKVPYDWTIYYLRKKGLTSKISKEELAWILLNFNQKRGYYQLRGEEEEENKNKLVEFYALKVVAVEDSGEKKGKDIWYNVHLENGWVYRRTSNMPLDWVGKTKEFIVTTDLEKDGTPKKDKEGNVKRSFRAPKEDDWSLLKKKTEADIDQTHKTVGVYIYDTLLGNPSQKIRGRLVRTIERKYYKEELKQILEKQKEFHLELQDRALYAACIEELYPINEAHRNNVGNRDFTYLFLEDILFYQRPLKSKKSLIDNCPYEENQGLDKETGEIKSFPVKCIAKSHPLFQEFRLWQFIVNLRIYRKDLAQDVDVTNELLKTEEDYVALFDWLNGKKEIDQKAFLKYPVFGLKKEIENYRWNYVQDKPYPCNETRSLMLARLEKCDISIEFLTKENEEALWHILYSVEDKNEIVKALQKFADKHDLNASFVDVFQKFPPFKKEYGSYSAKAIKKLLPLMRMGKYWSENSIDKGTRERIDKIITGEYDEKIENRVREKAIHLADVSDFKGLPLWLVCYIVYGRHSEAKEITQWKSPADIDSYLRSFKQHSLRNPIVEQIIIETLRVVRDIWKQVGNIDEIHVELGREMKNPADKRKKMTQQMSENENTNLRIKYLLTEFLNPEYEVENVRPYSPSQQDILRIYEEGVLNSVSDLPEEISDILKKFTETDLKKRPSRSEILRYKLWLEQKYRSPYTGEVIPLGKLFTPAYEIEHVIPQSCYFDDSFSNKVICEAEVNKLKSNLLGHEFIVKHHGEIVELPFGKKVRIFTVDEYEQFVKDNYSRTRSKMKKLLMDDIPEEFVTRQLNDSRYISKVVKSLLSNIVREKGEEEAISKNVIPCTGGVTDRLKKDWGINEVWNKIILPRFQRLNELTGTNKFTTKNVGIQEIPTMPLELQKGFNKKRIDHRHHAMDAIIIACANRNIINYLNNESATAKAELSRYDLQKMLCDKAKTDNNGNYKWVIRKPWASFTQDTYLALENIIVSFKQNLRVINKATNRFLHYNEEGKKIFVKQGKGDNWAIRKSMHKDTVFGEVNLRRIKTVALNEAMKNPQSIVVKDFKRKLLELWNLGFDAKRIKKYFEDNRETWSDINLSKIEVYYFSKDTKDRFFATRKPLDTSFDRKKIENNITDTGIQKILLRHLELKDNNPDIAFSPDGIDEMNRNIIQLNNGKYHQPIIKIRWYEQADKFAVGQTGNKFSKFVEAAKGTNLFFAVYESNILDKKTNTIIKKRNYATIPLNVAIERQKQGLPVAPEDENGNDPIFVLSPNDLVYLPTDDELANGIIAQPLDRGRIYKMVSCTGNEGHFIPARIANPILQTIELGSNNKAQKAWTDEMIKEICMPIKVDRLGNVLESSSSYKK

SEQ ID NO: 838 - protein, 1153 aa, Barnesiella intestinihominis
MKNILGLDLGLSSIGWSVIRENSEEQELVAMGSRVVSLTAAELSSFTQGNGVSINSQRTQKRTQRKGYDRYQLRRTLLRNKLDTLGMLPDDSLSYLPKLQLWGLRAKAVTQRIELNELGRVLLHLNQKRGYKSIKSDFSGDKKITDYVKTVKTRYDELKEMRLTIGELFFRRLTENAFFRCKEQVYPRQAYVEEFDCIMNCQRKFYPDILTDETIRCIRDEIIYYQRPLKSCKYLVSRCEFEKRFYLNAAGKKTEAGPKVSPRTSPLFQVCRLWESINNIVVKDRRNEIVFISAEQRAALFDFLNTHEKLKGSDLLKLLGLSKTYGYRLGEQFKTGIQGNKTRVEIERALGNYPDKKRLLQFNLQEESSSMVNTETGEIIPMISLSFEQEPLYRLWHVLYSIDDREQLQSVLRQKFGIDDDEVLERLSAIDLVKAGFGNKSSKAIRRILPFLQLGMNYAEACEAAGYNHSNNYTKAENEARALLDRLPAIKKNELRQPVVEKILNQMVNVVNALMEKYGRFDEIRVELARELKQSKEERSNTYKSINKNQRENEQIAKRIVEYGVPTRSRIQKYKMWEESKHCCIYCGQPVDVGDFLRGFDVEVEHIIPKSLYFDDSFANKVCSCRSCNKEKNNRTAYDYMKSKGEKALSDYVERVNTMYTNNQISKTKWQNLLTPVDKISIDFIDRQLRESQYIARKAKEILTSICYNVTATSGSVTSFLRHVWGWDTVLHDLNFDRYKKVGLTEVIEVNHRGSVIRREQIKDWSKRFDHRHHAIDALTIACTKQAYIQRLNNLRAEEGPDFNKMSLERYIQSQPHFSVAQVREAVDRILVSFRAGKRAVTPGKRYIRKNRKRISVQSVLIPRGALSEESVYGVIHVWEKDEQGHVIQKQRAVMKYPITSINREMLDKEKVVDKRIHRILSGRLAQYNDNPKEAFAKPVYIDKECRIPIRTVRCFAKPAINTLVPLKKDDKGNPVAWVNPGNNHHVAIYRDEDGKYKERTVTFWEAVDRCRVGIPAIVTQPDTIWDNILQRNDISENVLESLPDVKWQFVLSLQQNEMFILGMNEEDYRYAMDQQDYALLNKYLYRVQKLSKSDYSFRYHTETSVEDKYDGKPNLKLSMQMGKLKRVSIKSLLGLNPHKVHISVLGEIKEIS

SEQ ID NO: 839 - protein, 1352 aa, Belliella baltica
MKKILGLDLGTTSIGWAFIKEPEKDVVGSEIVDMGVRIVPLSSDEENDFAKGNTISINADRTLKRGARRNLQRFKQRRNALLEIFKEKKLISTNFKYAEDGPSSTFSTLNLRAKAAKEKIELQDLVKVLLQINKKRGYKSSRKAKSEEDDGSAIDSMGIAKELYENDLTPGQWVYEALQKGRKNVPDFYRSDLQEEFKKIVNYQSEFFPDIFNASFVEDWMGKASTPTKQYFNKKGVQLAENKGKREERRLQEYKWRAEAVNFKIDLSEIALILSQINSQISNSSGYLGAISDRSKELYFKNLTVGQYLYQQIKKNPHTRLKGQVFYRQDYLDEFERIWSVQSSFYPQLNDALKREVRDITIFFQRRLKSQKHLISNCEFEDHHKVVPKSHPVFQEFRIWQNLNNLLLIKKDNLNEKFDLELESKIALANELAFKRELNVKDALKILGLKPNEWEFNFTKIEGNRTNQAFFDAFAKIIELEDGEPIDLGDLKADDILDQFSEAFLRIGIDTELLQVNSDIEGAEYEKQSYIQFWHLLYSSEDDQKLKLNLIRKFGFKPEHAKILASISLQDDHASLSSRAIKKILPHLQSGLIYDKACTYAGYNHSSSFTKDENEKRELRAELELLKKNSLRNPVVEKILNQMINVVNAILKDPELGRPDEIRVEMARELKANAEQRKNMTSNIASATRDHDKYREILKSEFGLKRVTKNDLLRYKLWLETDGISLYTGKPIEASKLFSKEYDIEHIIPKARLFDDSFSNKTICERQLNIDKANVTAFSFLQNKLSADEFEQYQSRVKSLYGKLSKAKIQKLLMANDKIPEDFIARQLQETRYISKKAKEILFEISRRVSVTTGTITDKLREDWGLVEIMKELNWEKYDKLGLTYTIEGKHGERLNKIKDWSKRNDHRHHAMDALTVALTKPAYIQYLNNLNAKGLNNKKGTEVFAIEQKYLKRENGKLCFIPPIENIRSEAKKHLSRILVSYKAKNKVVTINKNKTKSKAGLNEQIALTPRGQLHKETVYGKSFHYSTKFEKIGASFNVQKINTVAKKEEREALLKRLAENGNDPKKAFTGKNTLNKMPIYLDLGKNIKLSEKVKTVVLEQNYTIRKNIDPDLKVDKVIDVGIKRILESRLEEFGGNAKLAFSNLEENPIWLNKEKGISIKRVKISGVSNVESLHVKKDHFGEPILDQEGNEIPVDFVSTGNNHHVAIYEDENGNLQEEVVSFFEAVVRQNQGLPIIKKNHTLGWKFLFTLKQNEYFVFPSDDFVPADVDLMDEQNYHLISPNLFRVQKIARKNYVFNNHLETKAVDNDLLKSKKELSKITYHFYQTPEHLRGIIKIRINHLGKIIQIGEY

SEQ ID NO: 840 - protein, 1415 aa, Bergeyella zoohelcum
MKHILGLDLGTNSIGWALIERNIEEKYGKIIGMGSRIVPMGAELSKFEQGQAQTKNADRRTNRGARRLNKRYKQRRNKLIYILQKLDMLPSQIKLKEDFSDPNKIDKITILPISKKQEQLTAFDLVSLRVKALTEKVGLEDLGKIIYKYNQLRGYAGGSLEPEKEDIFDEEQSKDKKNKSFIAFSKIVFLGEPQEEIFKNKKLNRRAIIVETEEGNFEGSTFLENIKVGDSLELLINISASKSGDTITIKLPNKTNWRKKMENIENQLKEKSKEMGREFYISEFLLELLKENRWAKIRNNTILRARYESEFEAIWNEQVKHYPFLENLDKKTLIEIVSFIFPGEKESQKKYRELGLEKGLKYIIKNQVVFYQRELKDQSHLISDCRYEPNEKAIAKSHPVFQEYKVWEQINKLIVNTKIEAGTNRKGEKKYKYIDRPIPTALKEWIFEELQNKKEITFSAIFKKLKAEFDLREGIDFLNGMSPKDKLKGNETKLQLQKSLGELWDVLGLDSINRQIELWNILYNEKGNEYDLTSDRTSKVLEFINKYGNNIVDDNAEETAIRISKIKFARAYSSLSLKAVERILPLVRAGKYFNNDFSQQLQSKILKLLNENVEDPFAKAAQTYLDNNQSVLSEGGVGNSIATILVYDKHTAKEYSHDELYKSYKEINLLKQGDLRNPLVEQIINEALVLIRDIWKNYGIKPNEIRVELARDLKNSAKERATIHKRNKDNQTINNKIKETLVKNKKELSLANIEKVKLWEAQRHLSPYTGQPIPLSDLFDKEKYDVDHIIPISRYFDDSFTNKVISEKSVNQEKANRTAMEYFEVGSLKYSIFTKEQFIAHVNEYFSGVKRKNLLATSIPEDPVQRQIKDTQYIAIRVKEELNKIVGNENVKTTTGSITDYLRNHWGLTDKFKLLLKERYEALLESEKFLEAEYDNYKKDFDSRKKEYEEKEVLFEEQELTREEFIKEYKENYIRYKKNKLIIKGWSKRIDHRHHAIDALIVACTEPAHIKRLNDLNKVLQDWLVEHKSEFMPNFEGSNSELLEEILSLPENERTEIFTQIEKFRAIEMPWKGFPEQVEQKLKEIIISHKPKDKLLLQYNKAGDRQIKLRGQLHEGTLYGISQGKEAYRIPLTKFGGSKFATEKNIQKIVSPFLSGFIANHLKEYNNKKEEAFSAEGIMDLNNKLAQYRNEKGELKPHTPISTVKIYYKDPSKNKKKKDEEDLSLQKLDREKAFNEKLYVKTGDNYLFAVLEGEIKTKKTSQIKRLYDIISFFDATNFLKEEFRNAPDKKTFDKDLLFRQYFEERNKAKLLFTLKQGDFVYLPNENEEVILDKESPLYNQYWGDLKERGKNIYVVQKFSKKQIYFIKHTIADIIKKDVEFGSQNCYETVEGRSIKENCFKLEIDRLGNIVKVIKR

SEQ ID NO: 841 - protein, 1430 aa, Bergeyella zoohelcum
MKHILGLDLGTNSIGWAVVKEAQNDNEQSEIVDVGVRVNPLTTDEKTNFEKGKPISTNADRTLKRSARRNLQRYKLRRKELIELLKEHQLISTDTILTENGKGTTFQTLELRAKSAKEKISLEELARVFLTINKKRGYKSSRKAKNEDEGQLIDGMEIAKRLYEENLTTGQLSLQLLKEGKKSLPDYYRSDLQFELDKVWNFQKQFHSDILTDEFYAQLKGKGQRATSALFLAKYQIYTAENKGSREDKKLQAYQWRVDALSKELTREQLAFVITEINNNLNNSSGYLGAISDRSKELYFNNETVGEYLWKQIAANPHTSLKNQVFYRQDYLDEFEQIWKTQSAFYPEILTDELKKELRDVVIFYQRKLKSQKSLVSFCEFENKEIEIKKEDGTSTKKVIGLKVAPKSSPLFQEFKIWQNLNNVLIRKKGSKTKKVAKNQQAVLFEEEKTISELDLEAKQALFNELNLKGNLKADYCLEILGYSPKEWEMNYSVLEGNRTNKALYEAYLKITDLEGYDAKNHLKVKLNKDEVELDDLKVPASEIKDMVQAIFKEAGINTDILHFNAELDGKDFENQASYQLWHLLYSYEGDDSKSGNELLYKLLETKFGFKKEYAQILANVSLSDDYGSLSTKAMRKIHPYIKENKFSTACELAGYRHSKHSLTKEENDNRVLKDSLEVLKKNSLRQPVVEKILNQMINLVNALLKKYRTENPNFKFDEIRIELARELKKNAEERANMTANINKAKTEHEKIIKILKNEFGLPNPTRNDIIRYRLYEELKANGYKDLYTNIKIPQEKLFTKEIDIEHIIPKSRVFDDSFSNKTLSFRKTNLDKGERTAFDYMESKFGADKLEEYVARVEDLYKNNIISKAKYQKLLKKESEIGDGFVERDLRETQYIAKKAKEILLQITPNVLSTSGGITDRLREDWDLINVMKELNLPKYRALGLTQMEDRKYGQQVEVITDWTKRNDHRHHAMDALTVAFTKHNHIQYLNYLNARKNEKHKEHSNIMGIQQLETIKVTDKNGNEKRVFKAPMPNFRQVTKAFLENILISHKAKNKVVTKNKNKVAGSNKVQEVLTPRGQLHKETVYGKYQYYVQKEEKIGAKFDLETIKKVANPLYQSLLKKRLEENGGDPKKAFTGKNSLAKNPIYLDDTQTEQLPEKVKLVWLENSFSIRKDITPENFKDEKLIDKILDEGVKRILKERLQSFGNDAKKAFSDLDKNPIWLNKEKGITIKRVTISGVANAEPLHTKKDHLGKEILDKEGKPIPVDFISTGSNHHVAVYRDEKGNLQEKVVSVFEAVVRANQGLPIIDKTYNQHLGWEFLFTMKQNEMFVFPNESTGFNPNDIDLLDPKNKRIISPNLFRVQKFSKLQYGNSFVREFVFRHHLETTVEDRKELQGITYKQMKNSTFFNDIIKVRINHLGDIVSIGEY

SEQ ID NO: 842 - protein, 1281 aa, Bifidobacterium bifidum
MEDDSQHDIREIYLAIHHMVKYRGNFLVEGTLESSNAFKEDELLKLLGRITRYEMSEGEQNSDIEQDDENKLVAPANGQLADALCATRGSRSMRVDNALEALSAVNDLSREQRAIVKAIFAGLEGNKLDLAKIFVSKEFSSENKKILGIYFNKSDYEEKCVQIVDSGLLDDEEREFLDRMQGQYNAIALKQLLGRSTSVSDSKCASYDAHRANWNLIKLQLRTKENEKDINENYGILVGWKIDSGQRKSVRGESAYENMRKKANVFFKKMIETSDLSETDKNRLIHDIEEDKLFPIQRDSDNGVIPHQLHQNELKQIIKKQGKYYPFLLDAFEKDGKQINKIEGLLAFRVPYFVGPLVVPEDLQKSDNSENHWMVRKKKGEITPWNFDEMVDKDASGRKFIERLVGTDSYLLGEPTLPKNSLLYQEYEVLNELNNVRLSVRTGNHWNDKRRMRLGREEKTLLCQRLFMKGQTVTKRTAENLLRKEYGRTYELSGLSDESKFTSSLSTYGKMCRIFGEKYVNEHRDLMEKIVELQTVFEDKETLLHQLRQLEGISEADCALLVNTHYTGWGRLSRKLLTTKAGECKISDDFAPRKHSIIEIMRAEDRNLMEIITDKQLGFSDWIEQENLGAENGSSLMEVVDDLRVSPKVKRGIIQSIRLIDDISKAVGKRPSRIFLELADDIQPSGRTISRKSRLQDLYRNANLGKEFKGIADELNACSDKDLQDDRLFLYYTQLGKDMYTGEELDLDRLSSAYDIDHIIPQAVTQNDSIDNRVLVARAENARKTDSFTYMPQIADRMRNFWQILLDNGLISRVKFERLTRQNEFSEREKERFVQRSLVETRQIMKNVATLMRQRYGNSAAVIGLNAELTKEMHRYLGFSHKNRDINDYHHAQDALCVGIAGQFAANRGFFADGEVSDGAQNSYNQYLRDYLRGYREKLSAEDRKQGRAFGFIVGSMRSQDEQKRVNPRTGEVVWSEEDKDYLRKVMNYRKMLVTQKVGDDFGALYDETRYAATDPKGIKGIPFDGAKQDTSLYGGFSSAKPAYAVLIESKGKTRLVNVTMQEYSLLGDRPSDDELRKVLAKKKSEYAKANILLRHVPKMQLIRYGGGLMVIKSAGELNNAQQLWLPYEEYCYFDDLSQGKGSLEKDDLKKLLDSILGSVQCLYPWHRFTEEELADLHVAFDKLPEDEKKNVITGIVSALHADAKTANLSIVGMTGSWRRMNNKSGYTFSDEDEFIFQSPSGLFEKRVTVGELKRKAKKEVNSKYRTNEKRLPTLSGASQP

SEQ ID NO: 843 - protein, 1121 aa, Bifidobacterium dentium
MSVGLAAIEVDETGFPIRILNIQSVIHDGGIDPQLGKKKSISRKAISGVARRTRRMRRRKVVRLRQLDATLESLGFPIVEPDSLDTWEIWLTRAKLASSYIQDDETRKEDVSIALRHIARHRGWRNPYSNVESLFVDVAPSEQYEELRRKAEEKLGTSLSGNPTSAEIVECILKRQVGEVQLRTRSRKGVNGNAVEKEGLLPTKLMQSDNAAEIRRIFKVQRIDDETGRKLLRAVFKACSPKGSVERRVGRDALAPGLPRALKASLAFQEYRIANVLTNLVISEDGTKRKLTIAEKQRVFGFLSSNETDDITWIDVAEKLGLERRQIQGVGCLTADGEERISSTPPRNITALHIHSAKPVIREKLVAWWKAASPTVRETMVELLSNTVDIDRVREDMDYSSAVAFIDSLGDEELTALDSVDLLSGRAAYSRQTLKQLTERMLNTDDDLHEARKAVFGVDDNWKPPVDAISTSVGNPAVDRVLKIVNRYLLACQKRWRNPQSVQIEHVRESFSSVAKAKETERVQGERARYRNDLRRELCEQEGLNKIRESDIRRWESVQRQNGTCLYCGSPITFRTCEMDHIVPRKGVGSTNTRVNLAAACAACNKLKSNTAFSVWARTEGAANRKVSQRDAIERVKTFIFNKSVPPREQRAFKQAVISRLRQAESDPAIDNRSIESVAWMADELHRRIEAYFNQDADVSGNTPATQVWVFQGRVTALARKASGIEGRIHFAGEWKKTRLDRRHHAVDAAVIAMMNHSAAQTLVERDSLRLSQWITRKPETWKNYPFSEGQKKTRFKEWLDCMNALLDLLNDALDSDRVPVTRCQRMSLGNSQAHAATIRKMKRVELFSPMDADLIRRASTPALYCALTRLPEYSPEKGLPENRGREIVLNGRHIRSTETVDFFASGAAQLMVRNGSAEIGDSIHHMRIYRYRKTGAKSQEYVYGMIRVFQIDLLHASSENLFAVQLPSQSVSVRYGDKNVVQAIQEGRAEYLGHIVPNDEILISYEGVRMKDSEKIGAYANDFSGTASELAQRRHWVVVGSDVSKLALRPSYLSEEGLENSGSESERLSKQTRKVIEGKGWVVAVNILAKYHPVVIRRNALGEPRFRTNSGMPVSWRWDR

SEQ ID NO: 844 - protein, 354 aa, Bifidobacterium longum
AKQYVNSASIDDAEAETMKTTVSVFQGRVTASARRAAGIEGKIHFIGQQSKTRLDRRHHAVDASVIAMMNTAAAQTLMERESLRESQRLIGLMPGERSWKEYPYEGTSRYESFHLWLDNMDVLLELLNDALDNDRIAVMQSQRYVLGNSIAHDATIHPLEKVPLGSAMSADLIRRASTPALWCALTRLPDYDEKEGLPEDSHREIRVHDTRYSADDEMGFFASQAAQIAVQEGSADIGSAIHHARVYRCWKTNAKGVRKYFYGMIRVFQTDLLRACHDDLFTVPLPPQSISMRYGEPRVVQALQSGNAQYLGSLVVGDEIEMDFSSLDVDGQIGEYLQFFSQFSGGNLAWKHWV

SEQ ID NO: 845 - protein, 1124 aa, Bifidobacterium longum
LTGHSGHTFWPTSSSPPIQLEQEKRPLPQRNTSQNGHTFWPITRERCFMRGKRYRIGIDVGLNSVGLAAVEVSDENSPVRLLNAQSVIHDGGVDPQKNKEAITRKNMSGVARRTRRMRRRKRERLHKLDMLLGKFGYPVIEPESLDKPFEEWHVRAELATRYIEDDELRRESISIALRHMARHRGWRNPYRQVDSLISDNPYSKQYGELKEKAKAYNDDATAAEEESTPAQLVVAMLDAGYAEAPRLRWRTGSKKPDAEGYLPVRLMQEDNANELKQIFRVQRVPADEWKPLFRSVFYAVSPKGSAEQRVGQDPLAPEQARALKASLAFQEYRIANVITNLRIKDASAELRKLTVDEKQSIYDQLVSPSSEDITWSDLCDFLGFKRSQLKGVGSLTEDGEERISSRPPRLTSVQRIYESDNKIRKPLVAWWKSASDNEHEAMIRLLSNTVDIDKVREDVAYASAIEFIDGLDDDALTKLDSVDLPSGRAAYSVETLQKLTRQMLTTDDDLHEARKTLFNVTDSWRPPADPIGEPLGNPSVDRVLKNVNRYLMNCQQRWGNPVSVNIEHVRSSFSSVAFARKDKREYEKNNEKRSIFRSSLSEQLRADEQMEKVRESDLRRLEAIQRQNGQCLYCGRTITFRTCEMDHIVPRKGVGSTNTRTNFAAVCAECNRMKSNTPFAIWARSEDAQTRGVSLAEAKKRVTMFTFNPKSYAPREVKAFKQAVIARLQQTEDDAAIDNRSIESVAWMADELHRRIDWYFNAKQYVNSASIDDAEAETMKTTVSVFQGRVTASARRAAGIEGKIHFIGQQSKTRLDRRHHAVDASVIAMMNTAAAQTLMERESLRESQRLIGLMPGERSWKEYPYEGTSRYESFHLWLDNMDVLLELLNDALDNDRIAVMQSQRYVLGNSIAHDATIHPLEKVPLGSAMSADLIRRASTPALWCALTRLPDYDEKEGLPEDSHREIRVHDTRYSADDEMGFFASQAAQIAVQEGSADIGSAIHHARVYRCWKTNAKGVRKYFYGMIRVFQTDLLRACHDDLFTVPLPPQSISMRYGEPRVVQALQSGNAQYLGSLVVGDEIEMDFPVSMLMVRLASIYNSSRSLVEGTLHGNIGLLMDSLTRRS

SEQ ID NO: 846 - protein, 166 aa, Bifidobacterium longum
MGLAAVEVSDENSPVRLLNAQSVIHDGGVDPQKNKEAITRKNMSGVARRTRRMRRRKRERLHKLDMLLGKFGYPVIEPESLDKPFEEWHVRAELATRYIEDDELRRESISIALRHMARHRGWRNPYRQVDSLISDNPYSKQYGELKEKAKAYNDDATAAEEESTPA

SEQ ID NO: 847 - protein, 1138 aa, Bifidobacterium longum
MNSVGLAAVEVSDENSPVRLLNAQSVIHDGGVDPQKNKEAITRKNMSGVARRTRRMRRRKRERLHKLDMLLGKFGYPVIEPESLDKPFEEWHVRAELATRYIEDDELRRESISIALRHMARHRGWRNPYRQVDSLISDNPYSKQYGELKEKAKAYNDDATAAEEESTPAQLVVAMLDAGYAEAPRLRWRTGSKKPDAEGYLPVRLMQEDNANELKQIFRVQRVPADEWKPLFRSVFYAVSPKGSAEQRVGQDPLAPEQARALKASLAFQEYRIANVITNLRIKDASAELRKLTVDEKQSIYDQLVSPSSEDITWSDLCDFLGFKRSQLKGVGSLTEDGEERISSRPPRLTSVQRIYESDNKIRKPLVAWWKSASDNEHEAMIRLLSNTVDIDKVREDVAYASAIEFIDGLDDDALTKLDSVDLPSGRAAYSVETLQKLTRQMLTTDDDLHEARKTLFNVTDSWRPPADPIGEPLGNPSVDRVLKNVNRYLMNCQQRWGNPVSVNIEHVRSSFSSVAFARKDKREYEKNNEKRSIFRSSLSEQLRADEQMEKVRESDLRRLEAIQRQNGQCLYCGRTITFRTCEMDHIVPRKGVGSTNTRTNFAAVCAECNRMKSNTPFAIWARSEDAQTRGVSLAEAKKRVTMFTFNPKSYAPREVKAFKQAVIARLQQTEDDAAIDNRSIESVAWMADELHRRIDWYFNAKQYVNSASIDDAEAETMKTTVSVFQGRVTASARRAAGIEGKIHFIGQQSKTRLDRRHHAVDASVIAMMNTAAAQTLMERESLRESQRLIGLMPGERSWKEYPYEGTSRYESFHLWLDNMDVLLELLNDALDNDRIAVMQSQRYVLGNSIAHDATIHPLEKVPLGSAMSADLIRRASTPALWCALTRLPDYDEKEGLPEDSHREIRVHDTRYSADDEMGFFASQAAQIAVQEGSADIGSAIHHARVYRCWKTNAKGVRKYFYGMIRVFQTDLLRACHDDLFTVPLPPQSISMRYGEPRVVQALQSGNAQYLGSLVVGDEIEMDFSSLDVDGQIGEYLQFFSQFSGGNLAWKHWVVDGFFNQTQLRIRPRYLAAEGLAKAFSDDVVPDGVQKIVTKQGWLPPVNTASKTAVRIVRRNAFGEPRLSSAHHMPCSWQWRHE

SEQ ID NO: 848 - protein, 182 aa, Bifidobacterium longum
MRGKRYRIGIDVGLNSVGLAAVEVSDENSPVRLLNAQSVIHDGGVDPQKNKEAITRKNMSGVARRTRRMRRRKRERLHKLDMLLGKFGYPVIEPESLDKPFEEWHVRAELATRYIEDDELRRESISIALRHMARHRGWRNPYRQVDSLISDNPYSKQYGELKEKAKAYNDDATAAEEESTPA

SEQ ID NO: 849 - protein, 441 aa, Bifidobacterium longum
MVAMLDAGYAEAPRLRWRTGSKKPDAEGYLPVRLMQEDNANELKQIFRVQRVPADEWKPLFRSVFYAVSPKGSAEQRVGQDPLAPEQARALKASLAFQEYRIANVITNLRIKDASAELRKLTVDEKQSIYDQLVSPSSEDITWSDLCDFLGFKRSQLKGVGSLTEDGEERISSRPPRLTSVQRIYESDNKIRKPLVAWWKSASDNEHEAMIRLLSNTVDIDKVREDVAYASAIEFIDGLDDDALTKLDSVDLPSGRAAYSVETLQKLTRQMLTTDDDLHEARKTLFNVTDSWRPPADPIGEPLGNPSVDRVLKNVNRYLMNCQQRWGNPVSVNIEHVRSSFSSVAFARKDKREYEKNNEKRSIFRSSLSEQLRADEQMEKVRESDLRRLEAIQRQNGQCLYCGRTITFRTCEMDHIVPRKGVGSTNTRTNFAAVCAECNRM

SEQ ID NO: 850 - protein, 967 aa, Bifidobacterium longum
MVAMLDAGYAEAPRLRWRTGSKKPDAEGYLPVRLMQEDNANELKQIFRVQRVPADEWKPLFRSVFYAVSPKGSAEQRVGQDPLAPEQARALKASLAFQEYRIANVITNLRIKDASAELRKLTVDEKQSIYDQLVSPSSEDITWSDLCDFLGFKRSQLKGVGSLTEDGEERISSRPPRLTSVQRIYESDNKIRKPLVAWWKSASDNEHEAMIRLLSNTVDIDKVREDVAYASAIEFIDGLDDDALTKLDSVDLPSGRAAYSVETLQKLTRQMLTTDDDLHEARKTLFNVTDSWRPPADPIGEPLGNPSVDRVLKNVNRYLMNCQQRWGNPVSVNIEHVRSSFSSVAFARKDKREYEKNNEKRSIFRSSLSEQLRADEQMEKVRESDLRRLEAIQRQNGQCLYCGRTITFRTCEMDHIVPRKGVGSTNTRTNFAAVCAECNRMKSNTPFAIWARSEDAQTRGVSLAEAKKRVTMFTFNPKSYAPREVKAFKQAVIARLQQTEDDAAIDNRSIESVAWMADELHRRIDWYFNAKQYVNSASIDDAEAETMKTTVSVFQGRVTASARRAAGIEGKIHFIGQQSKTRLDRRHHAVDASVIAMMNTAAAQTLMERESLRESQRLIGLMPGERSWKEYPYEGTSRYESFHLWLDNMDVLLELLNDALDNDRIAVMQSQRYVLGNSIAHDATIHPLEKVPLGSAMSADLIRRASTPALWCALTRLPDYDEKEGLPEDSHREIRVHDTRYSADDEMGFFASQAAQIAVQEGSADIGSAIHHARVYRCWKTNAKGVRKYFYGMIRVFQTDLLRACHDDLFTVPLPPQSISMRYGEPRVVQALQSGNAQYLGSLVVGDEIEMDFSSLDVDGQIGEYLQFFSQFSGGNLAWKHWVVDGFFNQTQLRIRPRYLAAEGLAKAFSDDVVPDGVQKIVTKQGWLPPVNTASKTAVRIVRRNAFGEPRLSSAHHMPCSWQWRHE

SEQ ID NO: 851 - protein, 1151 aa, Bifidobacterium sp.
MRGKRYRIGIDVGLNSVGLAAVEVSDENSPVRLLNAQSVIHDGGVDPQKNKEAITRKNMSGVARRTRRMRRRKRERLHKLDMLLGKFGYPVIEPESLDKPFEEWHVRAELATRYIEDDELRRESISIALRHMARHRGWRNPYRQVDSLISDNPYSKQYGELKEKAKAYNDDATAAEEESTPAQLVVAMLDAGYAEAPRLRWRTGSKKPDAEGYLPVRLMQEDNANELKQIFRVQRVPADEWKPLFRSVFYAVSPKGSAEQRVGQDPLAPEQARALKASLAFQEYRIANVITNLRIKDASAELRKLTVDEKQSIYDQLVSPSSEDITWSDLCDFLGFKRSQLKGVGSLTEDGEERISSRPPRLTSVQRIYESDNKIRKPLVAWWKSASDNEHEAMIRLLSNTVDIDKVREDVAYASAIEFIDGLDDDALTKLDSVDLPSGRAAYSVETLQKLTRQMLTTDDDLHEARKTLFNVTDSWRPPADPIGEPLGNPSVDRVLKNVNRYLMNCQQRWGNPVSVNIEHVRSSFSSVAFARKDKREYEKNNEKRSIFRSSLSEQLRADEQMEKVRESDLRRLEAIQRQNGQCLYCGRTITFRTCEMDHIVPRKGVGSTNTRTNFAAVCAECNRMKSNTPFAIWARSEDAQTRGVSLAEAKKRVTMFTFNPKSYAPREVKAFKQAVIARLQQTEDDAAIDNRSIESVAWMADELHRRIDWYFNAKQYVNSASIDDAEAETMKTTVSVFQGRVTASARRAAGIEGKIHFIGQQSKTRLDRRHHAVDASVIAMMNTAAAQTLMERESLRESQRLIGLMPGERSWKEYPYEGTSRYESFHLWLDNMDVLLELLNDALDNDRIAVMQSQRYVLGNSIAHDATIHPLEKVPLGSAMSADLIRRASTPALWCALTRLPDYDEKEGLPEDSHREIRVHDTRYSADDEMGFFASQAAQIAVQEGSADIGSAIHHARVYRCWKTNAKGVRKYFYGMIRVFQTDLLRACHDDLFTVPLPPQSISMRYGEPRVVQALQSGNAQYLGSLVVGDEIEMDFSSLDVDGQIGEYLQFFSQFSGGNLAWKHWVVDGFFNQTQLRIRPRYLAAEGLAKAFSDDVVPDGVQKIVTKQGWLPPVNTASKTAVRIVRRNAFGEPRLSSAHHMPCSWQWRHE

SEQ ID NO: 852 - protein, 1092 aa, Brevibacillus laterosporus
MAYTMGIDVGIASCGWAIVDLERQRIIDIGVRTFEKAENPKNGEALAVPRREARSSRRRLRRKKHRIERLKYMFVRNGLAVDIQHLEQTLRSQNEIDVWQLRVDGLDRMLTQKEWLRVLIHLAQRRGFQSNRKTDGSSEDGQVLVNVTENDRLMEEKDYRTVAEMMVKDEKFSDHKRNKNGNYHGVVSRASLLVEIHTLFESQRQHHNFLASKDFELEYINIWSSQRPVATKDQIEKMIGTCTFLPKEKRAPKASWHFQYFMLLQTINHIRITNAQGTRPLNKEEIEQVVNMALTKSKVSYHDIRKVLDLSEEYQFVGLDYGKEDEKKKVESKETIIKLDDYHKLNKIFNEVELAKGETWEAVDYDTVAYALTFFKDDEDIRDYLQNKYKDSKNRLVKNVANKEYTNELIEKVSTLSFRKVGHLSLKALRKIIPFLEQGMTYDKACQAAGFNFQGISKKKRSVVLPVIDQISNPVVNRALTQTRKVINALIKKYGSPETIHIETARELSKRFDERKNITKDYKENRDKNERAKKHLSELGIINPTGLDIVKYKLWCEQQGRCMYSNQPISFERLRESGYTEVDHIIPYSRSMNDSYNNRVLVMTRENREKSNQTPYEYMGNDTQRWDEFEQRVTTNPQIKKEKRQNLLLKGFTNRRELEMLERNLNDTRHITKYLSHFISTNLEFSPSDKKKKVVNTSGRITSHLRSRWGLEKNREQNDLHHAMDAVVIAVTSDSFIQQVTNYYKRKERRELNGDDKFPLPWKFFREEVIARLSPNPKEQIEALPNHFYSEDELADLQPIFVSRMPKRSITGEAHQAQFRRVVGKTKEGKNITAKKTALVDISYDKNGDFNMYGRETDPATYEAIKERYLEFGGNAKKAFSTDLHKPKKDGTKGPLIKSVRIMENKTLVHPVNKGKGVVYNSSIVRTDVFQRKEKYYLLPVYVTDVTKGKLPNKVIAAKKGYDDWIEVDDSFTFLYSLYPNDLIFIRQNPKKKISLKKRIESHSISDSKEVQEILTYYKGVDSSTAAIEFITHDGSYYAKGVGVQNLDCFEKYQVDILGNYSKVKGEKRLELETSDNNHKGKDVNSIKSTSR

SEQ ID NO: 853 - protein, 103 aa, Butyrivibrio fibrisolvens
MISVGQSRKDLEDLGYEFKLSFYKEDIIEYEKNGDILVERFLSRTMPQVRNYIETKPIDRPKYDKRNPVGLSKTSSIRKITMDILGNRFYVDKMSFNNVVGTQ

SEQ ID NO: 854 - protein, 177 aa, Butyrivibrio fibrisolvens
MLIAFSQMGYDAYHELTNKYIDFETGEIIDKEGFNELLNNDLVYKNTMYESKWLKIKGNIEKAAEKNKYWYQVNKKCNRGLCNQTVYGTRESDGDVYKISKIDIRTDDGFKKFKNIVDKGNESVFLMYENDPKTFELIMDIYKNYSDSKNPFVQYEKETGDIIRKYSKKITGQRFLN

SEQ ID NO: 855 - protein, 1442 aa, Caenispirillum salinarum
MPVLSPLSPNAAQGRRRWSLALDIGEGSIGWAVAEVDAEGRVLQLTGTGVTLFPSAWSNENGTYVAHGAADRAVRGQQQRHDSRRRRLAGLARLCAPVLERSPEDLKDLTRTPPKADPRAIFFLRADAARRPLDGPELFRVLHHMAAHRGIRLAELQEVDPPPESDADDAAPAATEDEDGTRRAAADERAFRRLMAEHMHRHGTQPTCGEIMAGRLRETPAGAQPVTRARDGLRVGGGVAVPTRALIEQEFDAIRAIQAPRHPDLPWDSLRRLVLDQAPIAVPPATPCLFLEELRRRGETFQGRTITREAIDRGLTVDPLIQALRIRETVGNLRLHERITEPDGRQRYVPRAMPELGLSHGELTAPERDTLVRALMHDPDGLAAKDGRIPYTRLRKLIGYDNSPVCFAQERDTSGGGITVNPTDPLMARWIDGWVDLPLKARSLYVRDVVARGADSAALARLLAEGAHGVPPVAAAAVPAATAAILESDIMQPGRYSVCPWAAEAILDAWANAPTEGFYDVTRGLFGFAPGEIVLEDLRRARGALLAHLPRTMAAARTPNRAAQQRGPLPAYESVIPSQLITSLRRAHKGRAADWSAADPEERNPFLRTWTGNAATDHILNQVRKTANEVITKYGNRRGWDPLPSRITVELAREAKHGVIRRNEIAKENRENEGRRKKESAALDTFCQDNTVSWQAGGLPKERAALRLRLAQRQEFFCPYCAERPKLRATDLFSPAETEIDHVIERRMGGDGPDNLVLAHKDCNNAKGKKTPHEHAGDLLDSPALAALWQGWRKENADRLKGKGHKARTPREDKDFMDRVGWRFEEDARAKAEENQERRGRRMLHDTARATRLARLYLAAAVMPEDPAEIGAPPVETPPSPEDPTGYTAIYRTISRVQPVNGSVTHMLRQRLLQRDKNRDYQTHHAEDACLLLLAGPAVVQAFNTEAAQHGADAPDDRPVDLMPTSDAYHQQRRARALGRVPLATVDAALADIVMPESDRQDPETGRVHWRLTRAGRGLKRRIDDLTRNCVILSRPRRPSETGTPGALHNATHYGRREITVDGRTDTVVTQRMNARDLVALLDNAKIVPAARLDAAAPGDTILKEICTEIADRHDRVVDPEGTHARRWISARLAALVPAHAEAVARDIAELADLDALADADRTPEQEARRSALRQSPYLGRAISAKKADGRARAREQEILTRALLDPHWGPRGLRHLIMREARAPSLVRIRANKTDAFGRPVPDAAVWVKTDGNAVSQLWRLTSVVTDDGRRIPLPKPIEKRIEISNLEYARLNGLDEGAGVTGNNAPPRPLRQDIDRLTPLWRDHGTAPGGYLGTAVGELEDKARSALRGKAMRQTLTDAGITAEAGWRLDSEGAVCDLEVAKGDTVKKDGKTYKVGVITQGIFGMPVDAAGSAPRTPEDCEKFEEQYGIKPWKAKGIPLA

SEQ ID NO: 856 - protein, 984 aa, Campylobacter coli
MARILAFDIGISSIGWAFSENDELKDCGVRIFTKAENPKTGESLALPRRLARSARKCLARRKARLNHLKHLIANEFKLNYEDYQSFDESLAKAYKGSLISPYELRFRALNELLSKQDFARVILHIAKRRGYDDIKNNGDEEKSEILKAIKQNEEKLVNYQSVGEYLYKEYFQKFKENSKEFINVRNKKESYERCIAQSFLKDELKLIFQKQREFGFSFSKKFEEEVLSVAFYKRALKDFSHLVGNCSFFTDEKRAPKNSPLAFMFVALTRIINLLNNLKNTEGILYTKDDLNALLNEVLKNGTLTYKQTKKLLGLSDDYEFKGEKGTYFIEFKKYKEFIKALGEHNLSQDDLNEIAKDITLIKDEIKLKKALAKYDLNQNQIDSLSKLEFKDHLNISFKALKLITPLMLEGKKYDEACNELNLKVAINEDKKDFLPAFNETYYKDEVTNPVVLRAIKEYRKVLNALLKKYGKVHKINIELAREVGKNHSQRAKIEKEQNENYKAKKDAELECEKLGLKINSKNILKLRLFKEQKEFCAYSGEKIKISDLQDEKMLEIDHIYPYSRSFDDSYMNKVLVFTKQNQEKLNQTPFEAFGNDSAKWQKIEVLAKNLPTKKQKRILDKNYKDKEQKNFKDRNLNDTRYIARLVLNYTKDYLDFLPLSDDENTKLNDTQKGSKVHVEAKSGMLTSALRHTWGFSAKDRNNHLHHAIDAVIIAYANNSIVKAFSDFKKEQESNSAELYAKKISELDYKNKRKFFEPFSGFRQKVLDKIDEIFVSKPERKKPSGALHEETFRKEEEFYQSYGGKEGVLKALELGKIRKVNGKIVKNGDMFRVDIFKHKKTNKFYAVPIYTMDFALKVLPNKAVARSKKGEIKDWILMDENYEFCFSLYKDSLILIQTKDMQEPEFVYYNAFTSSTVSLIVSKHDNKFETLSKNQKILFKNANEKEVIAKSIGIQNLKVFEKYIVSALGEVTKAEFRQREDFKK

SEQ ID NO: 857 - protein, 984 aa, Campylobacter coli
MARILAFDIGISSIGWAFSENDELKDCGVRIFTKAENPKTGESLALPRRLARSARKRLARRKARLNHLKHLIANEFKLNYEDYQSFDESLAKAYKGSLISPYELRFRALNELLSKQDFARVILHIAKRRGYDDIKNNGDEEKGKILKAIKQNEEKLVNYQSVGEYLYKEYFQKFKENSKEFINVRNKKESYERCITQSFLKYELKLIFQKQREFGFSFSKKFEEEVLSVAFYKRALKDFSHLVGNCSFFSDEKRAPKNSPLAFMFVALTRIINLLNNLKNTEGILYTKDDLNALLNEVLKNGTLTYKQTKKLLGLSDDYEFKGEKGTYFIEFKKYKEFIKALGEHNLSQDDLNEIAKDITLIKDEIKLKKALAKYDLNQNQIDSLSKLEFKDHLNISFKALKLITPLMLEGKKYDEACNELNLKVAINEDKKDFLPAFNETYYKDEVTNPVVLRAIKEYRKVLNALLKKYGKVHKINIELAREVGKNYSQRAKIEKEQNENYKAKKDAELECEKLGLKINSKNILKLRLFKEQKEFCAYSGEKIKISDLQDEKMLEIDHIYPYSRSFDDSYMNKVLVFTKQNQEKLNQTPFEAFGNDSAKWQKIEVLAKNLPTKKQKRILDKNYKDKEQKNFKDRNLNDTRYIARLVLNYTKDYLDFLPLSDDENTKLNDTQKGSKVHVEAKSGMLTSALRHTWGFSAKDRNNHLHHAIDAVIIAYANNSIVKAFSDFKKEQESNSAELYAKKISELDYKNKRKFFEPFSGFRQKVLDKIDEIFVSKPERKKPSGALHEETFRKEEEFYQSYGGKEGVLKALELGKIRKVNGKIVKNGDMFRVDIFKHKKTNKFYAVPIYTMDFALKVLPNKAVARSKKGEIKDWILMDENYEFCFSLYKDSLILIQTKDMQEPEFVYYNAFTSSTVSLIVSKHDNKFETLSKNQKILFKNANEKEVIAKSIGIQNLKVFEKYIVSALGEVTKAEFRQREDFKK

SEQ ID NO: 858 - protein, 984 aa, Campylobacter coli
MARILAFDIGISSIGWAFSENDELKDCGVRIFTKAENPKTGESLALPRRLARSARKRLARRKARLNHLKHLIANEFKLNYEDYQSFDESLAKAYKGSLISPYELRFRALNELLSKQDFARVILHIAKRRGYDDIKNNGDEEKSEILKAIKQNEEKLVNYQSVGEYLYKEYFQKFKENSKEFINVRNKKESYERCIAQSFLKDELKLIFQKQREFGFSFSKKFEEEVLSVAFYKRALKDFSHLVGNCSFFTDEKRAPKNSPLAFMFVALTRIINLLNNLKNTEGILYTKDDLNTLLNEVLKNGTLTYKQTKKLLGLSDDYEFKGEKGTYFIEFKKYKEFIKALGEHNLSQDNLNEIAKDITLIKDEIKLKKALAKYDLNQNQIDSLSKLEFKDHLNISFKALKLITPLMLEGKKYDEAYNELNLKVAINEDKKDFLPAFNETYYKDEVTNPVVLRAIKEYRKVLNALLKKYGKVHKINIELAREVGKNHSQRAKIEKEQNENYKAKKDAELECEKLGLKINSKNILKLRLFKEQKEFCAYSGEKIKISDLQDEKMLEIDHIYPYSRSFDDSYMNKVLVFTKQNQEKLNQTPFEAFGNDSAKWQKIEVLAKNLPTKKQKRILDKNYKDKEQKDFKDRNLNDTRYIARLVLNYTKDYLDFLPLSDDENTKLNDTQKGSKVHVEAKSGMLTSALRHTWGFSAKDRNNHLHHAIDAVIIAYANNSIVKAFSDFKKEQESNSAELYAKKISELDYKNKRKFFEPFSGFRQKVLDKIDEIFVSKPERKKPSGALHEETFRKEEEFYQSYGGKEGVLKALELGKIRKVNGKIVKNGDMFRVDIFKHKKTNKFYAVPIYTMDFALKVLPNKAVARSKKGEIKDWILMDENYEFCFSLYKDSLILIQTKDMQEPELVYFNAFTSSTVSLIVSKHDNKFETLSKNQKILFKNANEKEVIAKSIGIQNLKVFEKYIVSALGEVTKAEFRQREDFKK

SEQ ID NO: 859 - protein, 984 aa, Campylobacter coli
MARILAFDIGISSIGWAFSENDELKDCGVRIFTKAENPKTGESLALPRRLARSARKRLARRKARLNHLKHLIANEFKLNYEDYQSFDESLAKAYKGSLISPYELRFRALNELLSKQDFARVILHIAKRRGYDDIKNNGDEEKSEILKAIKQNEEKLVNYQSVGEYLYKEYFQKFKENSKEFINVRNKKESYERCIAQSFLKDELKLIFQKQREFGFSFSKKFEEEVLSVAFYKRALKDFSHLVGNCSFFTDEKRAPKNSPLAFMFVALTRIINLLNNLKNTEGILYTKDDLNALLNEVLKNGTLTYKQTKKLLGLSDDYEFKGEKGTYFIEFKKYKEFIKALGEHNLSQDDLNEIAKDITLIKDEIKLKKALAKYDLNQNQIDSLSKLEFKDHLNISFKALKLITPLMLEGKKYDEACNELNLKVAINEDKKDFLPAFNETYYKDEVTNPVVLRAIKEYRKVLNALLKKYGKVHKINIELAREVGKNYSQRAKIEKEQNENYKAKKDAELECEKLGLKINSKNILKLRLFKEQKEFCAYSGEKIKISDLQDEKMLEIDHIYPYSRSFDDSYMNKVLVFTKQNQEKLNQTPFEAFGNDSAKWQKIEVLAKNLPTKKQKRILDKNYKDKEQKNFKDRNLNDTRYIARLVLNYTKDYLDFLPLSDDENTKLNDTQKGSKVHVEAKSGMLTSALRHTWGFSAKDRNNHLHHAIDAVIIAYANNSIVKAFSDFKKEQESNSAELYAKKISELDYKNKRKFFEPFSGFRQKVLDKIDEIFVSKPERKKPSGALHEETFRKEEEFYQSYGGKEGVLKALELGKIRKVNGKIVKNGDMFRVDIFKHKKTNKFYAVPIYTMDFALKVLPNKAVARSKKGEIKDWILMDENYEFCFSLYKDSLILIQTKDMQEPEFVYYNAFTSSTVSLIVSKHDNKFETLSKNQKILFKNANEKEVIAKSIGIQNLKVFEKYIVSALGEVTKAEFRQREDFKK

SEQ ID NO: 860 - protein, 987 aa, Campylobacter coli
MARILAFDIGISSIGWAFSENDELKDCGVRIFTKAENPKTGESLALPRRLARSARKRLARRKARLNHLKHLIANEFKLNYEDYQSFDESLAKAYKGSLISPYELRFRALNELLSKQDFARVILHIAKRRGYDDIKNNGDEEKSEILKAIKQNEEKLVNYQSVGEYLYKEYFQKFKENSKEFINVRNKKESYERCIAQSFLKDELKLIFQKQREFGFSFSKKFEEEVLSVAFYKRALKDFSHLVGNCSFFTDEKRAPKNSPLAFMFVALTRIINLLNNLKNTEGILYTKDDLNTLLNEVLKNGTLTYKQTKKLLGLSDDYEFKGEKGTYFIEFKKYKEFIKALGEHNLSQDNLNEIAKDITLIKDEIKLKKALAKYDLNQNQIDSLSKLEFKDHLNISFKALKLITPLMLEGKKYDEAYNELNLKVAINEDKKDFLPAFNETYYKDEVTNPVVLRAIKEYRKVLNALLKKYGKVHKINIELAREVGKNHSQRAKIEKEQNENYKAKKDAELECEKLGLKINSKNILKLRLFKEQKEFCAYSGEKIKISDLQDEKMLEIDHIYPYSRSFDDSYMNKVLVFTKQNQEKLNQTPFEAFGNDSAKWQKIEVLAKNLPTKKQKRILDKNYKDKEQKDFKDRNLNDTRYIARLVLNYTKDYLDFLPLSDDENTKLNDTQKGSKVHVEAKSGMLTSALRHTWGFSAKDRNNHLHHAIDAVIIAYANNSIVKAFSDFKKEQESNSAELYAKKISELDYKNKRKFFEPFSGFRQKVLDKIDEIFVSKPERKKPSGALHEETFRKEEEFYQSYGGKEGVLKALELGKIRKVNGKIVKNGDMFRVDIFKHKKTNKFYAVPIYTMDFALKVLPNKAVARSKKGEIKDWILMDENYEFCFSLYKDSLILIQTKDMQEPELVYFNAFTSSTVSLIVSKHDNKFETLSKNQKILFKNANEKEVIAKSIGIQNLKVFEKYIVSALGEVTKAEFRQREDFKNELR

SEQ ID NO: 861 - protein, 984 aa, Campylobacter coli
MARILAFDIGISSIGWAFSENDELKDCGVRIFTKAENPKTGESLALPRRLARSARKRLARRKARLNHLKHLIANEFKLNYEDYQSFDESLAKAYKGSLISPYELRFRALNELLSKQDFARVILHIAKRRGYDDIKNNGDEEKSEILKAIKQNEEKLVNYQSVGEYLYKEYFQKFKENSKEFINVRNKKESYERCIAQSFLKDELKLIFQKQREFGFSFSKKFEEEVLSVAFYKRALKDFSHLVGNCSFFTDEKRAPKNSPLAFMFVALTRIINLLNNLKNTEGILYTKDDLNTLLNEVLKNGTLTYKQTKKLLGLSDDYEFKGEKGTYFIEFKKYKEFIKALGEHNLSQDNLNEIAKDITLIKDEIKLKKALAKYDLNQNQIDSLSKLEFKDHLNISFKALKLITPLMLEGKKYDEAYNELNLKVAINEDKKDFLPAFNETYYKDEVTNPVVLRAIKEYRKVLNALLKKYGKVHKINIELAREVGKNHSQRAKIEKEQNENYKAKKDAELECEKLGLKINSKNILKLRLFKEQKEFCAYSGEKIKISDLQDEKMLEIDHIYPYSRSFDDSYMNKVLVFTKQNQEKLNQTPFEAFGNDSAKWQKIEVLAKNLPTKKQKRILDKNYKDKEQKDFKDRNLNDTRYIARLVLNYTKDYLDFLPLSNDENTKLNDTQKGSKVHVEAKSGMLTSALRHTWGFSAKDRNNHLHHAIDAVIIAYANNSIVKAFSDFKKEQESNSAELYAKKISELDYKNKRKFFEPFSGFRQKVLDKIDEIFVSKPERKKPSGALHEETFRKEEEFYQSYGGKEGVLKALELGKIRKVNGKIVKNGDMFRVDIFKHKKTNKFYAVPIYTMDFALKVLPNKAVARSKKGEIKDWILMDENYEFCFSLYKDSLILIQTKDMQEPELVYFNAFTSSTVSLIVSKHDNKFETLSKNQKILFKNANEKEVIAKSIGIQNLKVFEKYIVSALGEVTKAEFRQREDFKK

SEQ ID NO: 862 - protein, 987 aa, Campylobacter coli
MARILAFDIGISSIGWAFSENDELKDCGVRIFTKAENPKTGESLALPRRLARSARKRLARRKARLNHLKHLIANEFKLNYEDYQSFDESLAKAYKGSLISPYELRFRALNELLSKQDFARVILHIAKRRGYDDIKNSDDKEKGAILKAIKQNEEKLANYQSVGEYLYKEYFQKFKENSKEFTNVRNKKESYERCIAQSFLKDELKLIFKKQREFGFSFSKKFEEEVLSVAFYKRALKDFSHLVGNCSFFTDEKRAPKNSPLAFMFVALTRIINLLNNLKNTEGILYTKDDLNALLNEVLKNGTLTYKQTKKLLGLSDDYEFKGEKGTYFIEFKKYKEFIKALGDHSLSQDDLNEIAKDITLIKDEIKLKKALAKYDLNQNQIDSLSKLEFKDHLNISFKALKLITPLMLEGKKYDEACNELNLKVAINEDKKDFLPAFNETYYKDEVTNPVVLRAIKEYRKVLNALLKKYGKVHKINIELAREVGKNYSQRAKIEKEQNENYKAKKDAELECEKLGLKINSKNILKLRLFKEQKEFCAYSGEKIKISDLQDEKMLEIDHIYPYSRSFDDSYMNKVLVFTKQNQEKLNKTPFEAFGNDSTKWQKIEVLAKNLPEKKQKRILDKNYKDKEQKDFKDRNLNDTRYIARLVLNYTKDYLDFLPLSDDENTKLNDTQKGSKVHVEAKSGMLTSALRHTWGFSTKDRNNHLHHAIDAVIIAYANNSIVKAFSDFKKEQESNSAELYAKKISELDYKNKRKFFEPFSGFRQKVLDKIDEIFVSKPERKKPSGALHEETFRKEEEFYQSYGGKEGVLKALELGKIRKVNGKIVKNGDMFRVDIFKHKKTNKFYAVPIYTMDFALKVLPNKAVARSKKGEIKDWILMDENYEFCFSLYKDSLILIQTKDMQEPEFVYYNAFTSSTVSLIVSKHDNKFETLSKNQKILFKNANEKEVIAKSIGIQNLKVFEKYIVSALGEVTKAEFRQREDFKNELR

SEQ ID NO: 863 - protein, 984 aa, Campylobacter coli
MARILAFDIGISSIGWAFSENDELKDCGVRIFTKAENPKTGESLALPRRLARSARKRLARRKARLNHLKHLIANEFKLNYEDYQSFDESLAKAYKGSLISPYELRFRALNELLSKQDFARVILHIAKRRGYDDIKNSDDKEKGAILKAIKQNEEKLTNYQSVGEYLYKEYFQKFKENSKEFTNVRNKKESYERCIAQSFLKDELKLIFKKQREFGFSFSKKFEEEVLSVAFYKRALKDFSHLVGNCSFFTDEKRAPKNSPLAFMFVALTRIINLLNNLKNTEGILYTKDDLNALLNEVLKNGTLTYKQTKKLLGLSDDYEFKGEKGTYFIEFKKYKEFIKALGDHSLSQDDLNEIAKDITLIKDEIKLKKALAKYDLNQNQIDSLSKLEFKDHLNISFKALKLITPLMLEGKKYDEACNELNLKVAINEDKKDFLPAFNETYYKDEVTNPVVLRAIKEYRKVLNALLKKYGKVHKINIELAREVGKNYSQRAKIEKEQNENYKAKKDAELECEKLGLKINSKNILKLRLFKEQKEFCAYSGEKIKISDLQDEKMLEIDHIYPYSRSFDDSYMNKVLVFTKQNQEKLNQTPFEAFGNDSAKWQKIEVLAKNLPTKKQKRILDKNYKDKEQKDFKDRNLNDTRYIARLVLNYTKDYLDFLPLSDDENTKLNDTQKGSKVHVEAKSGMLTSALRHTWGFSAKDRNNHLHHAIDAVIIAYANNSIVKAFSDFKKEQESNSAELYAKKISELDYKNKRKFFEPFSGFRQKVLDKIDEIFVSKPERKKPSGALHEETFRKEEEFYQSYGGKEGVLKALELGKIRKVNGKIVKNGDMFRVDIFKHKKTNKFYAVPIYTMDFALKVLPNKAVARSKKGEIKDWILMDENYEFCFSLYKDSLILIQTKDMQEPEFVYYNAFTSSTVSLIVSKHDNKFETLSKNQKILFKNANEKEVIAKSIGIQNLKVFEKYIVSALGEVTKAEFRQREDFKK

SEQ ID NO: 864 - protein, 965 aa, Campylobacter coli
MKIIGFNLGIANIGWALRENDEIIDCGVRVFDIPENPKNGNSLALERRENKARMKIVKRKKARMLATKTFLKKELNVDLSKLFLIGSTQSIYELRTKALSSLISKEELSAIILHIAKHRGYDDSALKNENGTIIEALNKNKEAMLKFKSVGEYFYKNFVQNKEVKKIRNTTEDYSNSVPRSLLKQELDLILDKQKELGLIKNADFKAKLFEIIFFKRPLKDFSNKIGNCIFFENEKRAAKNTISACEFVALGKVVNLLKSIEKDIGIVYEKDSINEIMSIILDKTSISYKKIRDILNLPQDINFKGLDYSKNNVENSKLVDLKKLNEFKKALGDGFTNLDKDILDSIATDITLTKDTATLKEKLKNYNVLNAEQIEKLSELVFNDHINLSLKALKQIIPLMYEGKRYDEACELCNFTIAKNQEKNEYLPLFEKTRFAKDISSPVVIRAICEFRKLLNDIIRRYGSVHKIHLELTRDFGISFNDRKKIIKEIEQNEQSRIKALETIKELKLEETSKNIQIVRLFEDQKGICPYSGLKMDLKCLDELVIDYIRPYNRSLDDSYSNKVLTFKKLNDLKQGKTPFEAFGEDEKLWAEINERIKEYNGKKRFKIFDKFFKDKKPFDFTEQTLQDTRWLTKLVASYLNEYLSFLPISEDENTALGYGEKGSKQHVILSSGMITQMLRNFWYLGFKNHKDYKNNAMDAIIVAFTTNSIIFTFNNFKKELDLAKAEFYANKISESDYLLKRKFLPPFSGFKEQALEKVKNIFVSHSLKIKNKGTLHELTPLKIKELKNTYGDLDLAVKLGKIRKYNDKYYANAKGSLVRTDLFADKENKFHAVSIYKADFSTKKLPNKTPATTSNGETKEGIEMNENYNFCMSLYKNTPISVKIKGMKEPIICYYHGFNTSGSKITYKKHDNNYHNLSEDEMVVFRKNDKESIVVGKILEIKKYSISPSGELSLIENEERKWF

SEQ ID NO: 865 - protein, 965 aa, Campylobacter coli
MKIIGFNLGIANIGWALRENDEIIDCGVRVFDIPENPKNGNSLALERRENKARMKIVKRKKARMLATKTFLKKELNVDLSKLFLIGSTQSIYELRTKALSSLISKEELSAIILHIAKHRGYDDSALKNENGTIIEALNKNKEAMLKFKSVGEYFYKNFVQNKEVKKIRNTTEDYSNSVPRSLLKQELDLILDKQKELGLIKNADFKAKLFEIIFFKRPLKDFSNKIGNCIFFENEKRAAKNTISACEFVALGKVVNLLKSIEKDIGIVYEKDSINEIMSIILDKTSISYKKIRDILNLPQDINFKGLDYSKNNAENSKLVDLKKLNEFKKALGDGFANLDKDILDSIATDITLTKDTATLKEKLKNYNVLNAEQIEKLSELVFNDHINLSLKALKQIIPLMYEGKRYDEACELCNFTIAKNQEKNEYLPLFEKTRFAKDISSPVVIRAICEFRKLLNDIIRRYGSVHKIHLELTRDFGISFNDRKKIIKEIEQNEQSRIKALETIKELKLEETSKNIQIVRLFEDQKGICPYSGLKMDLKCLDELVIDYIRPYNRSLDDSYSNKVLTFKKLNDLKQGKTPFEAFGEDEKLWAEINERIKEYNGKKRFKIFDKFFKDKKPFDFTEQTLQDTRWLTKLVASYLNEYLSFLPISEDENTALGYGEKGSKQHVVLSSGMITQMLRNFWYLGFKNHKNYKNNAMDAIIVAFTTNSIIFAFNNFKKELDLAKAEFYANKISESDYLLKRKFLPPFSGFKEQALEKVKNIFVSHSLKIKNKGTLHELTPLKIKELKNTYGDLDLAVKLGKIRKYNDKYYANTKGSLVRTDLFVDKENKFHAVSIYKADFSTKKLPNKTPATTSNGETKEGIEMNENYNFCMSLYKNTPVSVKIKGMKEPIICYYHGFNTSGSKITYKKHDNNYHNLSEDEMVVFRKNDKESIVVGKILEIKKYSISPSGELSLIENEKRKWF

SEQ ID NO: 866 - protein, 965 aa, Campylobacter coli
MKIIGFNLGIANIGWALRENDEIIDCGVRVFDIPENPKNGNSLALERRENKARMKIVKRKKARMLATKTFLKKELNVDLSKLFLIGSTQSIYELRTKALSSLISKEELSAIILHIAKHRGYDDSALKNENGTIIEALNKNKEAMLKFKSVGEYFYKNFVQNKEVKKIRNTTEDYSNSVPRSLLKQELDLILDKQKELGLIKNADFKEKLFEIIFFKRPLKDFSNKIGNCIFFENEKRAAKNTISACEFVALGKVVNLLKSIEKDIGIVYEKDSINEIMSIILDKTSISYKKIRDILNLPQDINFKGLDYSKNNAENSKLVDLKKLNEFKKALGDGFANLDKDILDSIATDITLTKDTATLKEKLKNYNVLNAEQIEKLSELVFNDHINLSLKALKQIIPLMYEGKRYDEACELCNFTIAKNQEKNEYLPLFEKTRFAKDISSPVVIRAICEFRKLLNDIIRRYGSVHKIHLELTRDFGISFNDRKKIIKEIEQNEQSRIKALETIKELKLEETSKNIQIVRLFEDQKGICPYSGLKMDLKCLDELVIDYIRPYNRSLDDSYSNKILTFKKLNDLKQGKTPFEAFGEDEKLWAEINERIKEYNGKKRFKIFDKFFKDKKPFDFTEQTLQDTRWLTKLVASYLNEYLLFLPINEDENTALGYGEKGSKQHVVLSSGMITQMLRNFWYLGFKNHKDYKNNAMDAIIVAFTTNSIIFAFNNFKKELDLAKAEFYANKISESDYLLKRKFLPPFSGFKEQALEKVKNIFVSHSLKIKNKGTLHELTPLKIKELKNTYGDLDLAVKLGKIRKYNDKYYANAKGSLVRTDLFADKENKFHAVSIYKADFSTKKLPNKTPATTSNGETKEGIEMNENYNFCMSLYKNTPISVKIKGMKEPIICYYHGFNTSGSKITYKKHDNNYHNLSEDEMVVFRKNDKESIVVGKILEIKKYSISPSGELSLIENEERKWF

SEQ ID NO: 867 - protein, 933 aa, Campylobacter coli
MKIIGFNLGIANIGWALRENDEIIDCGVRVFDIPENPKNGNSLALERRENKARMKIVKRKKARMLATKTFLKKELNVDLSKLFLIGSTQSIYELRTKALSSLISKEELSVIILHIAKHRGYDDSALKNENGTIIEALNKNKETMLKFKSVGEYFYKNFVQNKEVKKIRNTTEDYSNSVPRSLLKQELDLILDRQKELGLIKNADFKAKLFEIIFFKRPLKDFSNKIGNCIFFENEKRAAKNTISACEFVALGKVVNLLKSIEKDIGIVYEKDSINEIMSIILDKTSISYKKIRDILNLPQDINFKGLDYSKNNVENSKLVDLKKLNEFKKALGDGFTNLDKDILDSIATDITLTKDTATLKEKLKNYNVLNAEQIEKLSELVFNDHINLSLKALKQIIPLMYEGKRYDEACELCNFTIAKNQEKNEYLPLFEKTRFAKDISSPVVIRAICEFRKLLNDIIRRYGSVHKIHLELTRDFGISFNDRKKIIKEIEQNEQSRIKALETIKELKLEETSKNIQIVRLFEDQKGICPYSGLKMDLKCLDELVIDYIRPYNRSLDDSYSNKVLTFKKLNDLKQGKTPFEAFGEDEKLWAEINERIKEYNGKKRFKIFDKFFKDKKPFDFTEQTLQDTRWLTKLVASYLNEHLSFLPISEDENTALGYGEKGSKQHVILSSGMITQMLRNFWYLGFKNHKDYKNNAMDAIIVAFTTNSIIFTFNNFKKELDLAKAEFYANKISESDYLLKRKFLPPFSGFKEQALEKVKNIFVSHSLKIKNKGTLHELTPLKIKELKNTYGDLDLAVKLGKIRKYNDKYYANANGSLVRSDLFIDKKNKFHAVPIYKADFSTKKLPNKTPATTSNGETKEGIEMNENYNFCMSLYKNTPISVKIKGMKESIICYYHGFNTSGSKITYKKHDNNYHNLSEDEMVVFRKNDKE

SEQ ID NO: 868 - protein, 666 aa, Campylobacter jejuni
KGEKGTYFIEFKKYKEFIKALDEHSLSQDDLNEIAKDITLIKDEIKLKKALAKYDLKENQIDSLSKLEFKDHLNISFKALKLITPLMLEGKKYDEACNELNLKVAINEDKKDFLPAFNETYYKDEVTNPVVLRAIKEYRKILNALLKKYGKVHKINIELAREVGKNHSQRAKIEKEQNENYKAKKDAELECEKLGLKINSKNILKLRLFKEQKEFCVYSGEKIKLSDLQDEKMLEIDHIYPYSRSFDDSYMNKVLVFAKQNQEKLNKTPFEAFGNDSTKWQKIEVLTKNLPTKKQKRILDKNYKDKEQKDFKDRNLNDTRYIARLVLNYTKDYLDFLPLSDDENTKLNDTQKGSKVHVEAKSGMLTSALRHTWGFSTKDRNNHLHHAIDAAIIAYANNSIVKAFSDFKKEQESNSAELYAKKISELDYKNKRKFFEPFSGFRQKVLDKIDEIFVSKPERKKPSGALHEETFRKEEEFYQSYGGKEGVLKALELGKIRKVNGKIVKNGDMFRVDIFKHKKTNKFYAVPIYTMDFALKVLPNKAVARSKKGEIKDWILMDEDYEFCFSLYKDSLILIQTKDMQEPELVYFNAFTSSTVSLIVSKHDNKFETLSKNQKILFKNANEKEVIAKSIGIQNLKVFEKYIVSALGEVTKAEFRQREDFKNELR

SEQ ID NO: 869 - protein, 190 aa, Campylobacter jejuni
MAFDIGISSIGWAFSENDELKDCGVRIFTKVENPKTGESLALPRRLARSARKRLARRKARLNHLKHLIANEFKLNYEDYQSFDESLAKAYKGSLISPYELRFRALNELLSKQDFARVILHIAKRRGYDDIKNSDDKEKGAILKAIKQNEEKLANYQSVGEYLYKEYFQKFKENSKEFTNVRNKKKVMNAA

SEQ ID NO: 870 - protein, 985 aa, Campylobacter jejuni
MAKILAFDIGISSIGWAFVENDELKDCGVRIFTKAENPKTGESLALPRRLARSARKRLARRKARLNHLKHLIANEFKLNYEDYQSFDESLAKAYKGTLISPYELRFKALNELLSKQDLARVILHIAKRRGYDNIKNSDDKEKGAILKAVKENEEKLANYKSVGEYLYKEYFQKFKENSKEFINVRNKKESYERCIAQSFLKDELKLIFQKQREFGFNFSKKFEEEVLSVAFYKRALKDFSHLVGNCSFFVDEKRAPKNSPLAFEFVALTRIVNLLNNLNKNNSYIKDDLNALLSEVLKNGTLTYKQTKKILGLSDDYEFKGQKGNYFIEFKKYKEFIKALCEHNLNQDDLNEIAKDITLVKDETKLKKALAKYDLNQNQIENLSKIEFKDHLNISFKALKLIVPLMREGKKYDEVCNELNLKTAINEDKKEFLPAFNETYYKDEVNNPVVLRAIKEYRKVLNSLLKKYGKVHKINIELAREVGKNHRERSKIEKEQNENFKAKKDAELECEKLGLKINSKNILKLRLFKEQKEFCVYSGEKIKISDLQDEKMLEIDHIYPYSRSFDDSYMNKVLVFTKQNQEKLNKTPFEAFGKDDVKWQKIETLAKNLPAKKQKRILDKNYKDKEQKDFKDRNLNDTRYIARLVLNYTKDYLEFLPLSDDENIKLNDTQKGSKVHVEAKSGMLTSVLRHTWGFSTKDRNNHLHHAIDAVIIAYANASVVKAFSDFKKEQENYTAELYAKKINELDFKNKRKFFEPFSNFRQKVLEKIDEIFVSKPERKKPSGALHEETFYKEEEFYKEYGGKEGVLKALELGKIRKVNGKIVSNANMFRVDIFKYKKTNKFYAVPIYTMDFALGILPNKAVVGGKDKQGIIKDWLLMDENYEFCFSLYKDSLILLQTKDMQEPELVYFKSFKSSTAGLVVSKHDNKFENLNENQKKLFKSANEKKVVAEGIGIQNLKVFEKYIVSALGEITKAEIKERENFKKK

SEQ ID NO: 871 - protein, 987 aa, Campylobacter jejuni
MARILAFDIGISSIGWAFSENDELKDCGVRIFTKAENPKTGESLALPRCLARSARKRLARRKARLNHLKHLIANEFKLNYEDYQSFDESLAKAYKGSLISPYELRFRALNELLSKQDFARVILHIAKRRGYDDIKNNGDEEKGEILKAIKQNEEKLVSYQSVGEYLYKEYFQKFKENSKEFINVRNKKESYERCIAQSFLKDELKLIFQKQRKFGFSFSKKFEEEVLSVAFYKRALKDFSHLVGNCSFFTDEKRAPKNSPLAFMFVALTRIINLLNNLKNTEGILYTKDDLNTLLNEVLKNGTLTYKQTKKLLGLSNDYEFKGEKGTYFIEFQKYKEFVKALGEHNLSQDDLNEIAKDITLIKDEIKLKKALAKYDLNQNQIDSLSKLEFKDHLNISFKALKLITPLMLEGKKYDEACNELNLKVAINEDKKDFLPAFNETYYKDEVTNPVVLRAIKEYRKVLNALLKKYGKVHKINIELAREVGKNHSQRAKIEKEQNENYKAKKDAELECEKLGLKINSKNILKLRLFKEQKEFCVYSGEKIKISDLQDEKMLEIDHIYPYSRSFDDSYMNKVLVFTKQNQEKLNKTPFETFGNDRVKWQKIEVLAKNLPTKKQKRILDKNYKDKEQKDFKDRNLNDTRYIARLVLNYTKDYLDFLPLSDDENTKLNDTQKGSKVHVEAKSGMLTSTLRHTWGFSTKDRNNHLHHAIDAAIIAYANNSIVKAFSDFKKEQESNTAELYAKKISELDYKNKRKFFEPFSGFRQKLLDKIDEIFVSKPERKKPSGALHEETFRKEEEFYQSYGGKEGVLKALELGKIRKVNGKIVSNGDMFRVDIFKHKKTNKFYAVPIYTMDFALKVLPNKAVVQGKDKKSGLIKDWILMDENYEFCFSLYKDSLILIQTKDMQEPELVYYERLDSSNASLTVSKHDNKFETLSKNQKILFKNANEKEVIAKSIGIQNLKVFEKYIVSALGEVTKAEFRQREDFKK

SEQ ID NO: 872 - protein, 987 aa, Campylobacter jejuni
MARILAFDIGISSIGWAFSENDELKDCGVRIFTKAENPKTGESLALPRRLARSARKRLARRKARLNHLKHLIANEFKLNYEDYQSFDEGLAKAYKGSLISPYELRFRALNELLSKQDFARVILHIAKRRGYDDIKNNGDEEKSEILKAIKQNEEKLVNYQSVGEYLYKEYFQKFKENSKEFINVRNKKESYERCIAQSFLKDELKLIFQKQREFGFSFSKKFEEEVLSVAFYKRALKDFSHLVGNCSFFTDEKRAPKNSPLAFMFVALTRIINLLNNLKNTEGILYTKDDLNTLLNEVLKNGTLTYKQTKKLLGLSDDYEFKGEKGTYFIEFKKYKEFIKALGEHNLSQDNLNEIAKDITLIKDEIKLKKALAKYDLNQNQIDSLSKLEFKDHLNISFKALKLITPLMLEGKKYDEAYNELNLKVAINEDKKDFLPAFNETYYKDEVTNPVVLRAIKEYRKVLNALLKKYGKVHKINIELAREVGKNHSQRAKIEKEQNENYKAKKDAELECEKLGLKINSKNILKLRLFKEQKEFCAYSGEKIKISDLQDEKMLEIDHIYPYSRSFDDSYMNKVLVFTKQNQEKLNQTPFEAFGNDSAKWQKIEVLAKNLPTKKQKRILDKNYKDKEQKDFKDRNLNDTRYIARLVLNYTKDYLDFLPLSDDENTKLNDTQKGSKVHVEAKSGMLTSALRHTWGFSAKDRNNHLHHAIDAVIIAYANNSIVKAFSDFKKEQESNSAELYAKKISELDYKNKRKFFEPFSGFRQKVLDKIDEIFVSKPERKKPSGALHEETFRKEEEFYQSYGGKEGVLKALELGKIRKVNGKIVKNGDMFRVDIFKHKKTNKFYAVPIYTMDFALKVLPNKAVVQGKDKKSGLIKDWILMDENYEFCFSLYKDSLILIQTKDMQEPELVYFNAFTSSTVSLIVSKHDNKFETLSKNQKILFKNANEKEVIAKSIGIQNLKVFEKYIVSALGEVTKAEFRQREDFKK

SEQ ID NO: 873 - protein, 961 aa, Campylobacter jejuni
MARILAFDIGISSIGWAFSENDELKDCGVRIFTKAENPKTGESLALPRRLARSARKRLARRKARLNHLKHLIANEFKLNYEDYQSFDESLAKAYKGSLISPYELRFRALNELLSKQDFARVILHIAKRRGYDDIKNNGDEEKGKILKAIKQNEEKLVNYQSVGEYLYKEYFQKFKENSKEFINVRNKKESYERCITQSFLKYELKLIFQKQREFGFSFSKKFEEEVLSVAFYKRALKDFSHLVGNCSFFSDEKRAPKNSPLAFMFVALTRIINLLNNLKNTEGILYTKDDLNALLNEVLKNGTLTYKQTKKLLGLSDDYEFKGEKGTYFIEFKKYKEFIKALGEHNLSQDDLNEIAKDITLIKDEIKLKKALAKYDLNQNQIDSLSKLEFKDHLNIGFKALKLITPLMLEGKKYDEACNELNLKVAINEDKKDFLPAFNETYYKDEVTNPVVLRAIKEYRKVLNALLKKYGKVHKINIELAREVGKNHSQRAKIEKEQNENYKAKKDAELECEKLGLKINSKNILKLRLFKEQKEFCAYSGEKIKLSDLQDEKMLEIDHIYPYSRSFDDSYMNKVLVFTKQNQEKLNKTPFEAFGNDNVKWQKIEVLAKNLPEKKQKRILDKNYKDKEQKDFKDRNLNDTRYIARLVLNYTKDYLDFLPLSDDENTKLKGSKVHVEAKSGMLTSALRHTWGFSTKDRNNHLHHAIDAAIIAYANNSIVKDFSDFKKEQESNSAELYAKKISELDYKNKRKFFEPFSGFRQKVLDKIDEIFVSKPERKKPSGALHEETFRKEEEFYQSYGGKEGVLKALELGKIRKVNGKIVKNGDMFRVDIFKHKKTNKFYAVPIYTMDFALKVLPNKAVARSKKGEIKDWILMDENYEFCFSLYKDSLILIQTKDMQEPELVYFNAFTSSTVSLIVSKHDNKFETLSKNLKVFEKYIVSALGEVTKAEFRQREDFKNELR

SEQ ID NO: 874 - protein, 984 aa, Campylobacter jejuni
MARILAFDIGISSIGWAFSENDELKDCGVRIFTKAENPKTGESLALPRRLARSARKRLARRKARLNHLKHLIANEFKLNYEDYQSFDESLAKAYKGSLISPYELRFRALNELLSKQDFARVILHIAKRRGYDDIKNNGDEEKGKILKAIKQNEEKLVNYQSVGEYLYKEYFQKFKENSKEFINVRNKKESYERCITQSFLKYELKLIFQKQREFGFSFSKKFEEEVLSVAFYKRALKDFSHLVGNCSFFTDEKRAPKNSPLAFMFVALTRIINILNNLKNTEGILYTKDDLNALLNEVLKNGTLTYKQTKKLLGLSDDYEFKGEKGTYFIEFKKYKEFIKALGEHNLSQDDLNEIAKDITLIKDEIKLKKALAKYDLNQNQIDSLSKLEFKDHLNISFKALKLITPLMLEGKKYDEACNELNLKVAINEDKKDFLPAFNETYYKDEVTNPVVLRAIKEYRKILNALLKKYGKVHKINIELAREVGKNHSQRAKIEKEQNENYKAKKDAEIECEKLGLKINSKNILKLRLFKEQKEFCAYSGEKIKISDLQDEKMLEIDHIYPYSRSFDDSYMNKVLVFTKQNQEKLNQTPFEAFGNDSAKWQKIEVLAKNLPTKKQKRILDKNYKDKEQKDFKDRNLNDTRYIARLVLNYTKDYLDFLPLSDDENTKLNDTQKGSKVHVEAKSGMLTSALRHTWGFSAKDRNNHLHHAIDAVIIAYANNSIVKAFSDFKKEQESNSAELYAKKISELDYKNKRKFFEPFSGFRQKVLDKIDEIFVSKPERKKPSGALHEETFRKEEEFYQSYGGKEGVLKALELGKIRKVNGKIVKNGDMFRVDIFKHKKTNKFYAVPIYTMDFALKVLPNKAVARSKKGEIKDWILMDENYEFCFSLYKDSLILIQTKDMQEPEFVYYNAFTSSTVSLIVSKHDNKFETLSKNQKILFKNANEKEVIAKSIGIQNLKVFEKYIVSALGEVTKAEFRQREDFKK

SEQ ID NO: 875 - protein, 987 aa, Campylobacter jejuni
MARILAFDIGISSIGWAFSENDELKDCGVRIFTKAENPKTGESLALPRRLARSARKRLARRKARLNHLKHLIANEFKLNYEDYQSFDESLAKAYKGSLISPYELRFRALNELLSKQDFARVILHIAKRRGYDDIKNNGDEEKGKILKAIKQNEEKLVSYQSVGEYLYKEYFQKFKENSKEFINVRNKKESYERCIAQSFLKDELKLIFQKQREFGFSFSKKFEEEVLSVAFYKRALKDFSHLVGNCSFLLMKKERQKNSPLAFMFVALTRIINLLNNLKNTEGILYTKDDLNTLLNEALKNGTLTYKQTKKLLGLSNDYEFKGEKGTYFIEFQKYKEFVKALGEHNLSQDDLNEIAKDITLIKDEIKLKKALAKYDLNQNQIDSLSKLEFKDHLNISFKALKLITPLMLEGKKYDEACNELNLKVAINEDKKDFLPAFNETYYKDEVTNPVVLRAIKEYRKVLNALLKKYGKVHKINIELAREVGKNHSQRAKIEKEQNENYKAKKDAELECEKLGLKINSKNILKLRLFKEQKEFCVYSGEKIKISDLQDEKMLEIDHIYPYSRSFDDSYMNKVLVFTKQNQEKLNKTPFETFGNDRVKWQKIEVLAKNLPTKKQKRILDKNYKDKEQKDFKDRNLNDTRYIARLVLNYTKDYLDFLPLSDDENTKLNDTQKGSKVHVEAKSGMLTSTLRHTWGFSTKDRNNHLHHAIDAAIIAYANNSIVKAFSDFKKEQESNTAELYAKKISELDYKNKRKFFEPFSGFRQKLLDKIDEIFVSKPERKKPSGALHEETFRKEEEFYQSYGGKEGVLKALELGKIRKVNGKMVKNGDMFRVDIFKHKKTNKFYAVPIYTMDFALKVLPNKAVVQGKDKKSGLIKDWILMDENYEFCFSLYKDSLILIQTKDMQEPELVYYERLDSSNASLTVSKHDNKFETLSKNQKILFKNANEKEVIAKSIGIQNLKVFEKYIVSALGEVTKAEFRQREDFKK

SEQ ID NO: 876 - protein, 987 aa, Campylobacter jejuni
MARILAFDIGISSIGWAFSENDELKDCGVRIFTKAENPKTGESLALPRRLARSARKRLARRKARLNHLKHLIANEFKLNYEDYQSFDESLAKAYKGSLISPYELRFRALNELLSKQDFARVILHIAKRRGYDDIKNNGDEEKSEILKAIKQNEEKLVNYQSVGEYLYKEYFQKFKENSKEFINVRNKKESYERCIAQSFLKDELKLIFQKQREFGFSFSKKFEEEVLSVAFYKRALKDFSHLVGNCSFFTDEKRAPKNSPLAFMFVALTRIINLLNNLKNTEGILYTKDDLNTLLNEVLKNGTLTYKQTKKLLGLSDDYEFKGEKGTYFIEFKKYKEFIKALGEHNLSQDNLNEIAKDITLIKDEIKLKKALAKYDLNQNQIDSLSKLEFKDHLNISFKALKLITPLMLEGKKYDEAYNELNLKVAINEDKKDFLPAFNETYYKDEVTNPVVLRAIKEYRKVLNALLKKYGKVHKINIELAREVGKNHSQRAKIEKEQNENYKAKKDAELECEKLGLKINSKNILKLRLFKEQKEFCAYSGEKIKISDLQDEKMLEIDHIYPYSRSFDDSYMNKVLVFTKQNQEKLNQTPFEAFGNDSAKWQKIEVLAKNLPTKKQKRILDKNYKDKEQKDFKDRNLNDTRYIARLVLNYTKDYLDFLPLSDDENTKLNDTQKGSKVHVEAKSGMLTSALRHTWGFSAKDRNNHLHHAIDAVIIAYANNSIVKAFSDFKKEQESNSAELYAKKISELDYKNKRKFFEPFSGFRQKVLDKIDEIFVSKPERKKPSGALHEETFRKEEEFYQSYGGKEGVLKALELGKIRKVNGKIVKNGDMFRVDIFKHKKTNKFYPVPIYTMDFALKVLPNKAVVQGKDKKSGLIKDWILMDENYEFCFSLYKDSLILIQTKDMQEPELVYFNAFTSSTVSLIVSKHDNKFETLSKNQKILFKNANEKEVIAKSIGIQNLKVFEKYIVSALGEVTKAEFRQREDFKK

SEQ ID NO: 877 - protein, 987 aa, Campylobacter jejuni
MARILAFDIGISSIGWAFSENDELKDCGVRIFTKAENPKTGESLALPRRLARSARKRLARRKARLNHLKHLIANEFKLNYEDYQSFDESLAKAYKGSLISPYELRFRALNELLSKQDFARVILHIAKRRGYDDIKNNGDEEKSEILKAIKQNEEKLVNYQSVGEYLYKEYFQKFKENSKEFINVRNKKESYERCIAQSFLKDELKLIFQKQREFGFSFSKKFEEEVLSVAFYKRALKDFSHLVGNCSFFTDEKRAPKNSPLAFMFVALTRIINLLNNLKNTEGILYTKDDLNTLLNEVLKNGTLTYKQTKKLLGLSDDYEFKGEKGTYFIEFKKYKEFIKALGEHNLSQDNLNEIAKDITLIKDEIKLKKALAKYDLNQNQIDSLSKLEFKDHLNISFKALKLITPLMLEGKKYDEAYNELNLKVAINEDKKDFLPAFNETYYKDEVTNPVVLRAIKEYRKVLNALLKKYGKVHKINIELAREVGKNHSQRAKIEKEQNENYKAKKDAELECEKLGLKINSKNILKLRLFKEQKEFCAYSGEKIKISDLQDEKMLEIDHIYPYSRSFDDSYMNKVLVFTKQNQEKLNQTPFEAFGNDSAKWQKIEVLAKNLPTKKQKRILDKNYKDKEQKDFKDRNLNDTRYIARLVLNYTKDYLDFLPLSDDENTKLNDTQKGSKVHVEAKSGMLTSALRHTWGFSAKDRNNHLHHAIDAVIIAYANNSIVKAFSDFKKEQESNSAELYAKKISELDYKNKRKFFEPFSGFRQKVLDKIDEIFVSKPERKKPSGALHEETFRKEEEFHQSYGGKEGVLKALELGKIRKVNGKIVKNGDMFRVDIFKHKKTNKFYAVPIYTMDFALKVLPNKAVVQGKDKKSGLIKDWILMDENYEFCFSLYKDSLILIQTKDMQEPELVYFNAFTSSTVSLIVSKHDNKFETLSKNQKILFKNANEKEVIAKSIGIQNLKVFEKYIVSALGEVTKAEFRQREDFKK

SEQ ID NO: 878 - protein, 987 aa, Campylobacter jejuni
MARILAFDIGISSIGWAFSENDELKDCGVRIFTKAENPKTGESLALPRRLARSARKRLARRKARLNHLKHLIANEFKLNYEDYQSFDESLAKAYKGSLISPYELRFRALNELLSKQDFARVILHIAKRRGYDDIKNNGDEEKSEILKAIKQNEEKLVNYQSVGEYLYKEYFQKFKENSKEFINVRNKKESYERCIAQSFLKDELKLIFQKQREFGFSFSKKFEEEVLSVAFYKRALKDFSHLVGNCSFFTDEKRAPKNSPLAFMFVALTRIINLLNNLKNTEGILYTKDDLNTLLNEVLKNGTLTYKQTKKLLGLSDDYEFKGEKGTYFIEFKKYKEFIKALGEHNLSQDNLNEIAKDITLIKDEIKLKKALAKYDLNQNQIDSLSKLEFKDHLNISFKALKLITPLMLEGKKYDEAYNELNLKVAINEDKKDFLPAFNETYYKDEVTNPVVLRAIKEYRKVLNALLKKYGKVHKINIELAREVGKNHSQRAKIEKEQNENYKAKKDAELECEKLGLKINSKNILKLRLFKEQKEFCAYSGEKIKISDLQDEKMLEIDHIYPYSRSFDDSYMNKVLVFTKQNQEKLNQTPFEAFGNDSAKWQKIEVLAKNLPTKKQKRILDKNYKDKEQKDFKDRNLNDTRYIARLVLNYTKDYLDFLPLSDDENTKLNDTQKGSKVHVEAKSGMLTSALRHTWGFSAKDRNNHLHHAIDAVIIAYANNSIVKAFSDFKKEQESNSAELYAKKISELDYKNKRKFFEPFSGFRQKVLDKIDEIFVSKPERKKPSGALHEETFRKEEEFYQSYGGKEGVLKALELGKIRKVNGKIVKNGDMFRVDIFKHKKTNKFYAVPIYTMDFALKVLPNKAVVQGKDKKSGLIKDWILMDENYEFCFSLYKDSLILIQTKDMQEPELVYFNAFTSSTVSLIVSKHDNKFETLSKNQKILFKNANEKEVIAKSIGIQNLKVFEKYIVSALGEVTKAEFRQREDFKK

SEQ ID NO: 879 - protein, 861 aa, Campylobacter jejuni
MARILAFDIGISSIGWAFSENDELKDCGVRIFTKAENPKTGESLALPRRLARSARKRLARRKARLNHLKHLIANEFKLNYEDYQSFDESLAKAYKGSLISPYELRFRALNELLSKQDFARVILHIAKRRGYDDIKNNGDEEKSEILKAIKQNEEKLVNYQSVGEYLYKEYFQKFKENSKEFINVRNKKESYERCITQSFLKDELKLIFQKQREFGFSFSKKFEEEVLSVAFYKRALKDFSHLVGNCSFFTDEKRAPKNSPLAFMFVALTRIINILNNLKNTEGILYTKDDLNALLNEVLKNGTLTYKQTKKLLGLSDDYEFKGEKGTYFIEFKKYKEFIKALGEHNLSQDDLNEIAKDITLIKDEIKLKKALAKYDLNQNQIDSLSKLEFKDHLNISFKALKLITPLMLEGKKYDEACNELNLKVAINEDKKDFLPAFNETYYKDEVTNPVVLRAIKEYRKILNALLKKYGKVHKINIELAREVGKNHSQRAKIEKEQNENYKAKKDAEIECEKLGLKINSKNILKLRLFKEQKEFCAYSGEKIKLSDLQDEKMLEIDHIYPYSRSFDDSYMNKVLVFTKQNQEKLNKTPFEAFGNDSTKWQKIEVLAKNLPEKKQKRILDKNYKDKEQKDFKDRNLNDTRYIARLVLNYTKDYLDFLPLSDDENTKLNDTQKGSKVHVEAKSGMLTSALRHTWGFSAKDRNNHLHHAIDAAIIAYANNSIVKAFSDFKKEQESNSVELYAKKISELDYKNKRKFFEPFSGFRQKVLDKIDEIFVSKPERKKPSGALHEETFRKEEEFYQSYGGKEGVLKALELGKIRKVNGKIVKNGDMFRVDIFKHKKTNKFLCCANLYYGFCFKSITK

SEQ ID NO: 880 - protein, 462 aa, Campylobacter jejuni
MARILAFDIGISSIGWAFSENDELKDCGVRIFTKAENPKTGESLALPRRLARSARKRLARRKARLNHLKHLIANEFKLNYEDYQSFDESLAKAYKGSLISPYELRFRALNELLSKQDFARVILHIAKRRGYDDIKNNGDEEKSEILKAIKQNEEKLVNYQSVGEYLYKEYFQKFKENSKEFINVRNKKESYERCITQSFLKDELKLIFQKQREFGFSFSKKFEEEVLSVAFYKRALKDFSHLVGNCSFFTDEKRAPKNSPLAFMFVALTRIINILNNLKNTEGILYTKDDLNALLNEVLKNGTLTYKQTKKLLGLSDDYEFKGEKGTYFIEFKKYKEFIKALGEHNLSQDDLNEIAKDITLIKDEIKLKKALAKYDLNQNQIDSLSKLEFKDHLNISFKALKLITPLMLEGKKYDEACNELNLKVAINEDKKDFLPAFNETYYKDEVTNPVVLRAIKEYRKS

SEQ ID NO: 881 - protein, 984 aa, Campylobacter jejuni
MARILAFDIGISSIGWAFSENDELKDCGVRIFTKAENPKTGESLALPRRLARSARKRLARRKARLNHLKHLIANEFKLNYEDYQSFDESLAKAYKGSLISPYELRFRALNELLSKQDFARVILHIAKRRGYDDIKNNGDEEKSEILKAIKQNEEKLVNYQSVGEYLYKEYFQKFKENSKEFINVRNKKESYERCITQSFLKDELKLIFQKQREFGFSFSKKFEEEVLSVAFYKRALKDFSHLVGNCSFFTDEKRAPKNSPLAFMFVALTRIINLLNNLKNTEGILYTKDDLNALLNEVLKNGTLTYKQTKKLLGLSDDYEFKGEKGTYFIEFKKYKEFIKALDEHSLSQDDLNEIAKDITLIKDEIKLKKALAKYDLNQNQIDSLSKLEFKDHLNISFKALKLITPLMLEGKKYDEACNELNLKVAINEDKKDFLPAFNETYYKDEVTNPVVLRAIKEYRKILNALLKKYGKVHKINIELAREVGKNHSQRAKIEKEQNENYKAKKDAEIECEKLGLKINSKNILKLRLFKEQKEFCAYSGEKIKISDLQDEKMLEIDHIYPYSRSFDDSYMNKVLVFTKQNQEKLNKTPFEAFGNDGVKWQKIEVLAKNLPEKKQKRILDKNYKDKEQKDFKDRNLNDTRYIARLVLNYTKDYLDFLPLSDDENTKLNDTQKGSKVHVEAKSGMLTSALRHTWGFSTKDRNNHLHHAIDAAIIAYANNSIVKAFSDFKKEQESNSAELYAKKISELDYKNKRKFFEPFSGFRQKVLDKIDEIFVSKPERKKPSGALHEETFRKEEEFYQSYGGKEGVLKALELGKIRKVNGKIVKNGDMFRVDIFKHKKTNKFYAVPIYTMDFALKVLPNKAVARSKKGEIKDWILMDENYEFCFSLYKDSLILIQTKDMQEPELVYFNAFTSSTVSLVVSKHDNKFETLSKNQKILFKNANEKEVIAKSIGIQNLKVFEKYIVSALGEVTKAEFRQREDFKK

SEQ ID NO: 882 - protein, 984 aa, Campylobacter jejuni
MARILAFDIGISSIGWAFSENDELKDCGVRIFTKAENPKTGESLALPRRLARSARKRLARRKARLNHLKHLIANEFKLNYEDYQSFDESLAKAYKGSLISPYELRFRALNELLSKQDFARVILHIAKRRGYDDIKNSDDKEKGAILKAIKQNEEKLANYQSVGEYLYKEYFQKFKENSKEFTNVRNKKESYERCIAQSFLKDELKLIFKKQREFGFSFSKKFEEEVLSVAFYKRALKDFSHLVGNCSFFTDEKRAPKNSPLAFMFVALTRIINLLNNLKNTEGILYTKDDLNALLNEVLKNGTLTYKQTKKLLGLSDDYEFKGEKGTYFIEFKKYKEFIKALGDHSLSQDDLNEIAKDITLIKDEIKLKKALAKYDLNQNQIDSLSKLEFKDHLNISFKALKLITPLMLEGKKYDEACNELNLKVAINEDKKDFLPAFNETYYKDEVTNPVVLRAIKEYRKVLNALLKKYGKVHKINIELAREVGKNYSQRAKIEKEQNENYKAKKDAELECEKLGLKINSKNILKLRLFKEQKEFCAYSGEKIKISDLQDEKMLEIDHIYPYSRSFDDSYMNKVLVFTKQNQEKLNQTPFEAFGNDSAKWQKIEVLAKNLPTKKQKRILDKNYKDKEQKDFKDRNLNDTRYIARLVLNYTKDYLDFLPLSDDENTKLNDTQKGSKVHVEAKSGMLTSALRHTWGFSAKDRNNHLHHAIDAVIIAYANNSIVKAFSDFKKEQESNSAELYAKKISELDYKNKRKFFEPFSGFRQKVLDKIDEIFVSKPERKKPSGALHEETFRKEEEFYQSYGGKEGVLKALELGKIRKVNGKIVKNGDMFRVDIFKHKKTNKFYAVPIYTMDFALKVLPNKAVARSKKGEIKDWILMDENYEFCFSLYKDSLILIQTKDMQEPEFVYYNAFTSSTVSLIVSKHDNKFETLSKNQKILFKNANEKEVIAKSIGIQNLKVFEKYIVSALGEVTKAEFRQREDFKK

SEQ ID NO: 883 - protein, 984 aa, Campylobacter jejuni
MARILAFDIGISSIGWAFSENDELKDCGVRIFTKAENPKTGESLALPRRLARSARKRLARRKARLNHLKHLIANEFKLNYEDYQSFDESLAKAYKGSLISPYELRFRALNELLSKQDFARVILHIAKRRGYDDIKNSDDKEKGAILKAIKQNEEKLANYQSVGEYLYKEYFQKFKENSKEFTNVRNKKESYERCIAQSFLKDELKLIFKKQREFGFSFSKKFEEEVLSVAFYKRALKDFSHLVGNCSFFTDEKRAPKNSPLAFMFVALTRIINLLNNLKNTEGILYTKDDLNTLLNEVLKNGTLTYKQTKKLLGLSDDYEFKGEKGTYFIEFKKYKEFIKALGEHNLSQDDLNEIAKDITLIKDEIKLKKALAKYDLNQNQIDSLSKLEFKDHLNISFKALKLITPLMLEGKKYDEACNELNLKVAINEDKKDFLPAFNETYYKDEVTNPVVLRAIKEYRKVLNALLKKYGKVHKINIELAREVGKNYSQRAKIEKEQNENYKAKKDAELECEKLGLKINSKNILKLRLFKEQKEFCAYSGEKIKISDLQDEKMLEIDHIYPYSRSFDDSYMNKVLVFTKQNQEKLNKTPFEAFGNDSTKWQKIEVLAKNLPEKKQKRILDKNYKDKEQKDFKDRNLNDTRYIARLVLNYTKDYLDFLPLSDDENTKLNDTQKGLKVHVEAKSGMLTSALRHTWGFSAKDRNNHLHHAIDAVIIAYANNSIVKAFSDFKKEQESNSAELYAKKISELDYKNKRKFFEPFSGFRQKVLDKIDEIFVSKPERKKPSGALHEETFRKEEEFYQSYGGKEGVLKALELGKIRKVNGKIVKNGDMFRVDIFKHKKTNKFYAVPIYTMDFALKVLPNKAVARSKKGEIKDWILMDENYEFCFSLYKDSLILIQTKDMQEPEFVYYNAFTSSTVSLIVSKHDNKFETLSKNQKILFKNANEKEVIAKSIGIQNLKVFEKYIVSALGEVTKAEFRQREDFKK

SEQ ID NO: 884 - protein, 984 aa, Campylobacter jejuni
MARILAFDIGISSIGWAFSENDELKDCGVRIFTKAENPKTGESLALPRRLARSARKRLARRKARLNHLKHLIANEFKLNYEDYQSFDESLAKAYKGSLISPYELRFRALNELLSKQDFARVILHIAKRRGYDDIKNSDDKEKGAILKAIKQNEEKLANYQSVGEYLYKEYFQKFKENSKEFTNVRNKKESYERCIAQSFLKDELKLIFKKQREFGFSFSKKFEEEVLSVAFYKRALKDFSHLVGNCSFFTDEKRAPKNSPLAFMFVALTRIINLLNNLKNTEGILYTKDDLNALLNEVLKNGTLTYKQTKKLLGLSDDYEFKGEKGTYFIEFKKYKEFIKALGDHSLSQDDLNEIAKDITLIKDEIKLKKALAKYDLNQNQIDSLSKLEFKDHLNISFKALKLITPLMLEGKKYDEACNELNLKVAINEDKKDFLPAFNETYYKDEVTNPVVLRAIKEYRKVLNALLKKYGKVHKINIELAREVGKNYSQRAKIEKEQNENYKAKKDAELECEKLGLKINSKNILKLRLFKEQKEFCAYSGEKIKISDLQDEKMLEIDHIYPYSRSFDDSYMNKVLVFTKQNQEKLNQTPFEAFGNDSAKWQKIEVLAKNLPTKKQKRILDKNYKDKEQKNFKDRNLNDTRYIARLVLNYTKDYLDFLPLSDDENTKLNDTQKGSKVHVEAKSGMLTSALRHTWGFSAKDRNNHLHHTIDAVIIAYANNSIVKAFSDFKKEQESNSAELYAKKISELDYKNKRKFFEPFSGFRQKVLDKIDEIFVSKPERKKPSGALHEETFRKEEEFYQSYGGKEGVLKALELGKIRKVNGKIVKNGDMFRVDIFKHKKTNKFYAVPIYTMDFALKVLPNKAVARSKKGEIKDWILMDENYEFCFSLYKDSLILIQTKDMQEPEFVYYNAFTSSTVSLIVSKHDNKFETLSKNQKILFKNANEKEVIAKSIGIQNLKVFEKYIVSALGEVTKAEFRQREDFKK

SEQ ID NO: 885 - protein, 984 aa, Campylobacter jejuni
MARILAFDIGISSIGWAFSENDELKDCGVRIFTKAENPKTGESLALPRRLARSARKRLARRKARLNHLKHLIANEFKLNYEDYQSFDESLAKAYKGSLISPYELRFRALNELLSKQDFARVILHIAKRRGYDDIKNSDDKEKGAILKAIKQNEEKLANYQSVGEYLYKEYFQKFKENSKEFTNVRNKKESYERCIAQSFLKDELKLIFKKQREFGFSFSKKFEEEVLSVAFYKRALKDFSHLVGNCSFFTDEKRAPKNSPLAFMFVALTRIINLLNNLKNTEGILYTKDDLNTFLNEVLKNGTLTYKQTKKLLGLSDDYEFKGEKGTYFIEFKKYKEFIKALGDHNLSQDDLNEIAKDITLIKDEIKLKKALAKYDLNQNQIDSLSKLEFKDHLNISFKALKLITPLMLEGKKYDEACNELNLKVAINEDKKDFLPAFNETYYKDEVTNPVVLRAIKEYRKVLNALLKKYGKVHKINIELAREVGKNHSQRAKIEKEQNENYKAKKDAELECEKLGLKINSKNILKLRLFKEQKEFCAYSGEKIKISDLQDEKMLEIDHIYPYSRSFDDSYMNKVLVFTKQNQEKLNKTPFEAFGNDSAKWQKIEVLAKNLPTKKQKRILDKNYKDKEQKDFKDRNLNDTRYIARLVLNYTKDYLDFLPLSDDENTKLNDTQKGSKVHVEAKSGMLTSALRHTWGFSTKDRNNHLHHAIDAVIIAYANNSIVKAFSDFKKEQESNSAELYAKKISELDYKNKRKFFEPFSGFRQKVLDKIDEIFVSKPERKKPSGALHEETFRKEEEFYQSYGGKEGVLKALELGKIRKVNGKIVKNGDMFRVDIFKHKKTNKFYAVPIYTMDFALKVLPNKAVARSKKGEIKDWILMDENYEFCFSLYKDSLILIQTKDMQEPEFVYYNAFTSSTVSLIVSKHDNKFETLSKNQKILFKNANEKEVIAKSIGIQNLKVFEKYIVSALGEVTKAEFRQREDFKK

SEQ ID NO: 886 - protein, 987 aa, Campylobacter jejuni
MARILAFDIGISSIGWAFSENDELKDCGVRIFTKAENPKTGESLALPRRLARSARKRLARRKARLNHLKHLIANEFKLNYEDYQSFDESLAKAYKGSLISPYELRFRALNELLSKQDFARVILHIAKRRGYDDIKNSDDKEKGAILKAIKQNEEKLANYQSVGEYLYKEYFQKFKENSKEFTNVRNKKESYERCIAQSFLKDELKLIFKKQREFGFSFSKKFEEEVLSVAFYKRALKDFSHLVGNCSFFTDEKRAPKNSPLAFMFVALTRIINLLNNLKNTEGILYTKDDLNTLLNEVLKNGTLTYKQTKKLLGLSDDYEFKGEKGTYFIEFKKYKEFIKSLGDHSLSQDDLNEIAKDITLIKDEIKLKKALAKYDLNQNQIDSLSKLEFKDHLNISFKALKLITPLMLEGKKYDEACNELNLKVAINEDKKDFLPAFNETYYKDEVTNPVVLRAIKEYRKVLNALLKKYGKVHKINIELAREVGKNHSQRAKIEKEQNENYKAKKDAELECEKLGLKINSKNILKLRLFKEQKEFCAYSGEKIKISDLQDEKMLEIDHIYPYSRSFDDSYMNKVLVFTKQNQEKLNQTPFEAFGNDSAKWQKIEVLAKNLPTKKQKRILDKNYKDKEQKNFKDRNLNDTRYIARLVLNYTKDYLDFLPLSDDENTKLNDTQKGSKVHVEAKSGMLTSALRHTWGFSAKDRNNHLHHAIDAVIIAYANNSIVKAFSDFKKEQESNSAELYAKKISELDYKNKRKFFEPFSGFRQKVLDKIDEIFVSKPERKKPSGALHEETFRKEEEFYQSYGGKEGVLKALELGKIRKVNGKIVKNGDMFRVDIFKHKKTNKFYAVPIYTMDFALKVLPNKAVARSKKGEIKDWILMDENYEFCFSLYKDSLILIQTKDMQEPEFVYYNAFTSSTVSLIVSKHDNKFETLSKNQKILFKNANEKEVIAKSIGIQNLKVFEKYIVSALGEVTKAEFRQREDFKNELR

SEQ ID NO: 887 - protein, 987 aa, Campylobacter jejuni
MARILAFDIGISSIGWAFSENDELKDCGVRIFTKAENPKTGESLALPRRLARSARKRLARRKARLNHLKHLIANEFKLNYEDYQSFDESLAKAYKGSLISPYELRFRALNELLSKQDFARVILHIAKRRGYDDIKNSDDKEKGAILKAIKQNEEKLANYQSVGEYLYKEYFQKFKENSKEFTNVRNKKESYERCIAQSFLKDELKLIFKKQREFGFSFSKKFEEEVLSVAFYKRALKDFSHLVGNCSFFTDEKRAPKNSPLAFMFVALTRIINLLNNLKNTEGILYTKDDLNALLNEVLKNGTLTYKQTKKLLGLSDDYEFKGEKGTYFIEFKKYKEFIKALGDHSLSQDDLNEIAKDITLIKDEIKLKKALVKYDLNQNQIDSLSKLEFKDHLNISFKALKLITPLMLEGKKYDEACNELNLKVAINEDKKDFLPAFNETYYKDEVTNPVVLRAIKEYRKVLNALLKKYGKVHKINIELAREVGKNYSQRAKIEKEQNENYKAKKDAELECEKLGLKINSKNILKLRLFKEQKEFCAYSGEKIKISDLQDEKMLEIDHIYPYSRSFDDSYMNKVLVFTKQNQEKLNQTPFEAFGNDSAKWQKIEVLAKNLPTKKQKRILDKNYKDKEQKDFKDRNLNDTRYIARLVLNYTKDYLDFLPLSDDENTKLNDTQKGSKVHVEAKSGMLTSALRHTWGFSAKDRNNHLHHAIDAVIIAYANNSIVKAFSDFKKEQESNSAELYAKKISELDYKNKRKFFEPFSGFRQKVLDKIDEIFVSKPERKKPSGALHEETFRKEEEFYQSYGGKEGVLKALELGKIRKVNGKIVKNGDMFRVDIFKHKKTNKFYAVPIYTMDFALKVLPNKAVARSKKGEIKDWILMDENYEFCFSLYKDSLILIQTKDMQEPELVYFNAFTSSTVSLIVSKHDNKFETLSKNQKILFKNANEKEVIAKSIGIQNLKVFEKYIVSALGEVTKAEFRQREDFKNELR

SEQ ID NO: 888 - protein, 983 aa, Campylobacter jejuni; identical to SEQ ID NO: 231

SEQ ID NO: 889 - protein, 987 aa, Campylobacter jejuni
MARILAFDIGISSIGWAFSENDELKDCGVRIFTKAENPKTGESLALPRRLARSARKRLARRKARLNHLKHLIANEFKLNYEDYQSFDESLAKAYKGSLISPYELRFRALNELLSKQDFARVILHIAKRRGYDDIKNSDDKEKGAILKAIKQNEEKLVNYQSVGEYLYKEYFQKFKENSKEFTNVRNKKESYERCIAQSFLKDELKLIFKKQREFGFSFSKKFEEEVLSVAFYKRALKDFSHLVGNCSFFTDEKRAPKNSPLAFMFVALTRIINLLNNLKNTEGILYTKDDLNALLNEVLKNGTLTYKQTKKLLGLSDDYEFKGEKGTYFIEFKKYKEFIKALGDHSLSQDDLNEIAKDITLIKDEIKLKKALAKYDLNQNQIDSLSKLEFKDHLNISFKALKLITPLMLEGKKYDEACNELNLKVAINEDKKDFLPAFNETYYKDEVTNPVVLRAIKEYRKVLNALLKKYGKVHKINIELAREVGKNYSQRAKIEKEQNENYKAKKDAELECEKLGLKINSKNILKLRLFKEQKEFCAYSGEKIKISDLQDEKMLEIDHIYPYSRSFDDSYMNKVLVFTKQNQEKLNQTPFEAFGNDSAKWQKIEVLAKNLPTKKQKRILDKNYKDKEQKDFKDRNLNDTRYIARLVLNYTKDYLDFLPLSDDENTKLNDTQKGSKVHVEAKSGMLTSALRHTWGFSAKDRNNHLHHAIDAVIIAYANNSIVKAFSDFKKEQESNSAELYAKKISELDYKNKRKFFEPFSGFRQKVLDKIDEIFVSKPERKKPSGALHEETFRKEEEFYQSYGGKEGVLKALELGKIRKVNGKIVKNGDMFRVDIFKHKKTNKFYAVPIYTMDFALKVLPNKAVARSEKGEIKDWILMDENYEFCFSLYKDSLILIQTKDMQEPELVYFNAFTSSTVSLIVSKHDNKFETLSKNQKILFKNANEKEVIAKSIGIQNLKVFEKYIVSALGEVTKAEFRQREDFKNELR

SEQ ID NO: 890 - protein, 987 aa, Campylobacter jejuni
MARILAFDIGISSIGWAFSENDELKDCGVRIFTKAENPKTGESLALPRRLARSARKRLARRKARLNHLKHLIANEFKLNYEDYQSFDESLAKAYKGSLISPYELRFRALNELLSKQDFARVILHIAKRRGYDNIKNSDNEEKSEILKAIKQNEEKLVNYQSVGEYLYKEYFQKFKENSKEFINVRNKKESYERCIAQSFLKDELKLIFQKQREFGLSFSKKFEEEVLSVAFYKRALKDFSHLVGNCSFFTDEKRAPKNSPLAFMFVALTRIINLLNNLKNTEGILYTKDDLNTLLNEVLKNGTLTYKQTKKLLGLSDDYEFKGEKGTYFIEFKKYKEFIKALGDHSLSQDDLNEIAKDITLIKDEIKLKKALAKYDLNQNQIDSLSKLEFKDHLNISFKALKLITPLMLEGKKYDEACNELNLKVVINEDKKDFLPAFNETYYKDEVTNPVVLRAIKEYRKVLNALLKKYGKVHKINIELAREVGKNHSQRAKIEKEQNENYKAKKDAELECEKLGLKINNKNILKLRLFKEQKEFCAYSGEKIKLSDLQDEKMLEIDHIYPYSRSFDDSYMNKVLVFTKQNQEKLNKTPFEAFGNDSTKWQKIEVLAKNLPTKKQKRILDKNYKDKEQKDFKDRNLNDTRYIARLVLNYTKDYLDFLPLSDDENTKLNDIQKGSKVHVEAKSGMLTSALRHTWGFSTKDRNNHLHHAIDAVIIAYANNSIVKAFSDFKKEQESNSAELYAKKISELDYKNKRKFFEPFSGFRQKVLDKIDEIFVSKPERKKPSGALHEETFRKEEEFYQSYGGKEGVLKALELGKIRKVNGKIVKNGDMFRVDIFKHKKTNKFYAVPIYTMDFALKVLPNKAVVQGKDKKSGLIKDWILMDENYEFCFSLYKDSLILIQTKDMQEPEFVYYNAFTSSTVSLIVSKHDNKFETLSKNQKILFKNANEKEVIAKSIGIQNLKVFEKYIVSALGEVTKAEFRQREDFKK

SEQ ID NO: 891 - protein, 984 aa, Campylobacter jejuni
MARILAFDIGISSIGWAFSENDELKDCGVRIFTKAENPKTGESLALPRRLARSARKRLARRKARLNHLKHLIANEFKLNYEDYQSFDESLAKAYKGSLISPYELRFRALNELLSKQDFARVILHIVKRRGYDDIKNSDDKEKGAILKAIKQNEEKLANYQSVGEYLYKEYFQKFKENSKEFTNVRNKKESYERCIAQSFLKDELKLIFKKQREFGFSFSKKFEEEVLSVAFYKRALKDFSHLVGNCSFFTDEKRAPKNSPLAFMFVALTRIINLLNNLKNTEGILYTKDDLNTLLNEVLKNGTLTYKQTKKLLGLSDDYEFKGEKGTYFIEFKKYKEFIKALGDHSLSQDDLNEIAKDITLIKDEIKLKKALAKYDLNQNQIDSLSKLEFKDHLNISFKALKLITPLMLEGKKYDEACNELNLKVAINEDKKDFLPAFNETYYKDEVTNPVVLRAIKEYRKVLNALLKKYGKVHKINIELAREVGKNHSQRAKIEKEQNENYKAKKDAEFECEKLGLKINSKNILKLRLFKEQKEFCAYSGEKIKISDLQDEKMLEIDHIYPYSRSFDDSYMNKVLVFTKQNQEKLNKTPFEAFGNDSAKWQKIEVLAKNLPTKKQKRILDKNYKDKEQKDFKDRNLNDTRYIARLVLNYTKDYLDFLPLSDDENTKLNDTQKGSKVHVEAKSGMLTSALRHTWGFSTKDRNNHLHHAIDAVIIAYANNSIVKAFSDFKKEQESNSAELYAKKISELDYKNKRKFFEPFSGFRQKVLDKIDEIFVSKPERKKPSGALHEETFRKEEEFYQSYGGKEGVLKALELGKIRKVNGKIVKNGDMFRVDIFKHKKTNKFYAVPIYTMDFALKVLPNKAVARSKKGEIKDWILMDENYEFCFSLYKDSLILIQTKDMQEPEFVYYNAFTSSTVSLIVSKHDNKFETLSKNQKILFKNANEKEVIAKSIGIQNLKVFEKYIVSALGEVTKAEFRQREDFKK

SEQ ID NO: 892 - protein, 984 aa, Campylobacter jejuni
MARILAFDIGISSIGWAFSENDELKDCGVRIFTKAENPKTGESLALPRRLARSARKRLARRKARLNHLKHLIANEFKLNYEDYQSFDESLAKAYKGSLISPYELRFRALNELLSKQDFARVILHIVKRRGYDDIKNSDDKEKGTILKAIKQNEEKLANYQSVGEYLYKEYFQKFKENSKEFTNVRNKKESYERCIAQSFLKDELKLIFKKQREFGFSFSKKFEEEVLSVAFYKRALKDFSHLVGNCSFFTDEKRAPKNSPLAFMFVALTRIINLLNNLKNTEGILYTKDDLNTLLNEVLKNGTLTYKQTKKLLGLSDDYEFKGEKGTYFIEFKKYKEFIKALGEHNLSQDDLNEIAKDITLIKDEIKLKKALAKYDLNQNQIDSLSKLEFKDHLNISFKALKLITPLMLEGKKYDEACNELNLKVAINEDKKDFLPAFNETYYKDEVTNPVVLRAIKEYRKVLNALLKKYGKVHKINIELAREVGKNYSQRAKIEKEQNENYKAKKDAELECEKLGLKINSKNILKLRLFKEQKEFCAYSGEKIKISDLQDEKMLEIDHIYPYSRSFDDSYMNKVLVFTKQNQEKLNQTPFEAFGNDSAKWQKIEVLAKNLPTKKQKRILDKNYKDKEQKDFKDRNLNDTRYIARLVLNYTKDYLDFLPLSDDENTKLNDTQKGSKVHVEAKSGMLTSALRHTWGFSAKDRNNHLHHAIDAVIIAYANNSIVKAFSDFKKEQESNSAELYAKKISELDYKNKRKFFEPFSGFRQKVLDKIDEIFVSKPERKKPSGALHEETFRKEEEFYQSYGGKEGVLKALELGKIRKVNGKIVKNGDMFRVDIFKHKKTNKFYAVPIYTMDFALKVLPNKAVARSKKGEIKDWILMDENYEFCFSLYKDSLILIQTKDMQEPEFVYYNAFTSSTVSLIVSKHDNKFETLSKNQKILFKNANEKEVIAKSIGIQNLKVFEKYIVSALGEVTKAEFRQREDFKK

SEQ ID NO: 893 - protein, 987 aa, Campylobacter jejuni
MARILAFDIGISSIGWAFSENDELKDCGVRIFTKAENPKTGESLALPRRLARSARKRLARRKARLNHLKHLIANEFKLNYEDYQSFNESLAKAYKGSLISPYELRFRALNELLSKQDFARVILHIAKRRGYDDIKNSDDKEKGAILKVIKQNEEKLANYQSVGEYLYKEYFQKFKENSKEFTNVRNKKESYERCIAQSFLKDELKLIFQKQREFGFSFSKKFEEEVLSVAFYKRALKDFSHLVGNCSFFTDEKRAPKNSPLAFMFVALTRIINLLNNLKNTEGILYTKDDLNALLNEVLKNGTLTYKQTKKLLGLSDDYEFKGEKGTYFIEFKKYKEFIKALGDHSLSQDDLNEIAKDITLIKDEIKLKKALAKYDLNQNQIDSLSKLEFKDHLNISFKALKLITPLMLEGKKYDEACNELNLKVAINEDKKDFLPAFNETYYKDEVTNPVVLRAIKEYRKVLNALLKKYGKVHKINIELAREVGKNYSQRAKIEKEQNENYKAKKDAELECEKLGLKINSKNILKLRLFKEQKEFCAYSGEKIKISDLQDEKMLEIDHIYPYSRSFDDSYMNKVLVFTKQNQEKLNQTPFEAFGNDSAKWQKIEVLAKNLPTKKQKRILDKNYKDKEQKDFKDRNLNDTRYIARLVLNYTKDYLDFLPLSDDENTKLNDTQKGSKVHVEAKSGMLTSALRHTWGFSAKDRNNHLHHAIDAVIIAYANNSIVKAFSDFKKEQESNSAELYAKKISELDYKNKRKFFEPFSGFRQKVLDKIDEIFVSKPERKKPSGALHEETFRKEEEFYQSYGGKEGVLKALELGKIRKVNGKIVKNGDMFRVDIFKHKKTNKFYAVPIYTMDFALKVLPNKAVARSKKGEIKDWILMDENYEFCFSLYKDSLILIQTKDMQEPELVYFNAFTSSTVSLIVSKHDNKFETLSKNQKILFKNANEKEVIAKSIGIQNLKVFEKYIVSALGEVTKAEFRQREDFKNELR

SEQ ID NO: 894 - protein, 984 aa, Campylobacter jejuni
MARILAFDIGISSIGWAFSENDELKDCGVRIFTKAENPKTGESLALPRRLARSARKRLARRKARLNRLKHLIANEFKLNYEDYQSFDESLAKAYKGSLISPYELRFRALNELLSKQDFARVILHIAKRRGYDDIKNSDDKEKGAILKAIKQNEEKLANYQSVGEYLYKEYFQKFKENSKEFTNVRNKKESYERCIAQSFLKDELKLIFKKQREFGFSFSKKFEEEVLSVAFYKRALKDFSHLVGNCSFFTDEKRAPKNSPLAFMFVALTRIINLLNNLKNTEGILYTKDDLNALLNEVLKNGTLTYKQTKKLLGLSDDYEFKGEKGTYFIEFKKYKEFIKALGDHSLNQDDLNEIAKDITLIKDEIKLKKALAKYDLNQNQIDSLSKLEFKDHLNISFKALKLITPLMLEGKKYDEACNELNLKVAINEDKKDFLPAFNETYYKDEVTNPVVLRAIKEYRKVLNALLKKYGKVHKINIELAREVGKNYSQRAKIEKEQNENYKAKKDAELECEKLGLKINSKNILKLRLFKEQKEFCVYSGEKIKISDLQDEKMLEIDHIYPYSRSFDDSYMNKVLVFTKQNQEKLNQTPFEAFGNDSAKWQKIEVLAKNLPTKKQKRILDKNYKDKEQKDFKDRNLNDTRYIARLVLNYTKDYLDFLPLSDDENTKLNDTQKGSKVYVEAKSGMLTSALRHTWGFSTKDRNNHLHHAIDAVIIAYANNSIVKAFSDFKKEQESNSAELYAKKISELDYKNKRKFFEPFSGFRQKVLDKIDEIFVSKPERKKPSGALHEETFRKEEEFYQSYGGKEGVLKALELGKIRKVNGKIVKNGDMFRVDIFKHKKTNKFYAVPIYTMDFALKVLPNKAVARSKKGEIKDWILMDENYEFCFSLYKDSLILIQTKDMQEPEFVYYNAFTSSTVSLIVSKHDNKFETLSKNQKILFKNANEKEVIAKSIGIQNLKVFEKYIVSALGEVTKAEFRQREDFKK

SEQ ID NO: 895 - protein, 984 aa, Campylobacter jejuni
MARILAFDIGISSIGWAFSENDELKDCGVRIFTKVENPKTGESLALPRRLARSARKRLARRKARLNHLKHLIANEFKLNYEDYQSFDESLAKAYKGSLISPYELRFRALNELLSKQDFARVILHIAKRRGYDDIKNSDDKEKGAILKAIKQNEEKLANYQSVGEYLYKEYFQKFKENSKEFTNVRNKKESYERCIAQSFLKDELKLIFKKQREFGFSFLKKFEEEVLSVAFYKRALKDFSHLVGNCSFFTDEKRAPKNSPLAFMFVALTRIINLLNNLKNTEGILYTKDDLNALLNEVLKNGTLTYKQTKKLLGLSDDYEFKGEKGTYFIEFKKYKEFIKALGEHNLSQDDLNEIAKDITLIKDEIKLKKALAKYDLNQNQIDSLSKLEFKDHLNISFKALKLITPLMLEGKKYDEAYNELNLKVAINEDKKDFLPAFNETYYKDEVTNPVVLRAIKEYRKVLNALLKKYGKVHKINIELAREVGKNHSQRAKIEKEQNENYKAKKDAELECEKLGLKINSKNILKLRLFKEQKEFCAYSGEKIKISDLQDEKMLEIDHIYPYSRSFDDSYMNKVLVFTKQNQEKLNQTPFEAFGNDSAKWQKIEVLAKNLPTKKQKRILDKNYKDKEQKDFKDRNLNDTRYIARLVLNYTKDYLDFLPLSDDENTKLNDTQKGSKVHVEAKSGMLTSALRHTWGFSAKDRNNHLHHAIDAVIIAYANNSIVKAFSDFKKEQESNSAELYAKKISELDYKNKRKFFEPFSGFRQKVLDKIDEIFVSKPERKKPSGALHEETFRKEEEFYQSYGGKEGVLKALELGKIRKVNGKIVKNGDMFRVDIFKHKKTNKFYAVPIYTMDFALKVLPNKAVARSKKGEIKDWILMDENYEFCFSLYKDSLILIQTKDMQEPELVYFNAFTSSTVSLIVSKHDNKFETLSKNQKILFKNANEKEVIAKSIGIQNLKVFEKYIVSALGEVTKAEFRQREDFKK

SEQ ID NO: 896 - protein, 984 aa, Campylobacter jejuni
MARILAFDIGISSIGWAFSENDELKDCGVRIFTKVENPKTGESLALPRRLARSARKRLARRKARLNHLKHLIANEFKLNYEDYQSFDESLAKAYKGSLISPYELRFRALNELLSKQDFARVILHIAKRRGYDDIKNSDDKEKGAILKAIKQNEEKLANYQSVGEYLYKEYFQKFKENSKEFTNVRNKKESYERCIAQSFLKDELKLIFKKQREFGFSFSKKFEEEVLSVAFYKRALKDFSHLVGNCSFFTDEKRAPKNSPLAFMFVALTRIINLLNNLKNTEGILYTKDDLNALLNEVLKNGTLTYKQTKKLLGLSDDYEFKGEKGTYFIEFKKYKEFIKALGEHNLSQDDLNEIAKDITLIKDEIKLKKALAKYDLNQNQIDSLSKLEFKDHLNISFKALKLITPLMLEGKKYDEACNELNLKVAINEDKKDFLPAFNETYYKDEVTNPVVLRAIKEYRKVLNALLKKYGKVHKINIELAREVGKNHSQRAKIEKEQNENYKAKKDAELECEKLGLKINSKNILKLRLFKEQKEFCAYSGEKIKISDLQDEKMLEIDHIYPYSRSFDDSYMNKVLVFTKQNQEKLNKTPFEAFGNDSAKWQKIEVLAKNLPTKKQKRILDKNYKDKEQKDFKDRNLNDTRYIARLVLNYTKDYLDFLPLSNDENTKLNDTQKGSKVHVEAKSGMLTSALRHTWGFSTKDRNNHLHHAIDAVIIAYANNSIVKAFSDFKKEQESNSAELYAKKISELDYKNKRKFFEPFSGFRQKVLDKIDEIFVSKPERKKPSGALHEETFRKEEEFYQSYGGKEGVLKALELGKIRKVNGKIVKNGDMFRVDIFKHKKTNKFYAVPIYTMDFALKVLPNKAVARSKKGEIKDWILMDENYEFCFSLYKDSLILIQTKDMQEPEFVYYNAFTSSTVSLIVSKHDNKFETLSKNQKILFKNANEKEVIAKSIGIQNLKVFEKYIVSALGEVTKAEFRQREDFKK

SEQ ID NO: 897 - protein, 984 aa, Campylobacter jejuni
MARILAFDIGISSIGWAFSENDELKDCGVRIFTKVENPKTGESLALPRRLARSARKRLARRKARLNHLKHLIANEFKLNYEDYQSFDESLAKAYKGSLISPYELRFRALNELLSKQDFARVILHIAKRRGYDDIKNSDDKEKGAILKAIKQNEEKLANYQSVGEYLYKEYFQKFKENSKEFTNVRNKKESYERCIAQSFLKDELKLIFKKQREFGFSFSKKFEEEVLSVAFYKRALKDFSHLVGNCSFFTDEKRAPKNSPLAFMFVALTRIINLLNNLKNTEGILYTKDDLNALLNEVLKNGTLTYKQTKKLLGLSDDYEFKGEKGTYFIEFKKYKEFIKALGEHNLSQDDLNEIAKDITLIKDEIKLKKALAKYDLNQNQIDSLSKLEFKDHLNISFKALKLITPLMLEGKKYDEACNELNLKVAINEDKKDFLPAFNETYYKDEVTNPVVLRAIKEYRKVLNALLKKYGKVHKINIELAREVGKNHSQRAKIEKEQNENYKAKKDAELECEKLGLKINSKNILKLRLFKEQKEFCAYSGEKIKISDLQDEKMLEIDHIYPYSRSFDDSYMNKVLVFTKQNQEKLNKTPFEAFGNDSAKWQKIEVLAKNLPTKKQKRILDKNYKDKEQKDFKDRNLNDTRYIARLVLNYTKDYLDFLPLSDDENTKLNDTQKGSKVHVEAKSGMLTSALRHTWGFSTKDRNNHLHHAIDAVIIAYANNSIVKAFSDFKKEQESNSAELYAKKISELDYKNKRKFFEPFSGFRQKVLDKIDEIFVSKPERKKPSGALHEETFRKEEEFYQSYGGKEGVLKALELGKIRKVNGKIVKNGDMFRVDIFKHKKTNKFYAVPIYTMDFALKVLPNKAVARSKKGEIKDWILMDENYEFCFSLYKDSLILIQTKDMQEPEFVYYNAFTSSTVSLIVSKHDNKFETLSKNQKILFKNANEKEVIAKSIGIQNLKVFEKYIVSALGEVTKAEFRQREDFKK

SEQ ID NO: 898 - protein, 984 aa, Campylobacter jejuni
MARILAFDIGISSIGWAFSENDELKDCGVRIFTKVENPKTGESLALPRRLARSARKRLARRKARLNHLKHLIANEFKLNYEDYQSFDESLAKAYKGSLISPYELRFRALNELLSKQDFARVILHIAKRRGYDDIKNSDDKEKGAILKAIKQNEEKLANYQSVGEYLYKEYFQKFKENSKEFTNVRNKKESYERCIAQSFLKDELKLIFKKQREFGFSFSKKFEEEVLSVAFYKRALKDFSHLVGNCSFFTDEKRAPKNSPLAFMFVTLTRIINLLNNLKNTEGILYTKDDLNALLNEVLKNGTLTYKQTKKLLGLSDDYEFKGEKGTYFIEFKKYKEFIKALGEHNLSQDDLNEIAKDITLIKDEIKLKKALAKYDLNQNQIDSLSKLEFKDHLNISFKALKLITPLMLEGKKYDEACNELNLKVAINEDKKDFLPAFNETYYKDEVTNPVVLRAIKEYRKVLNALLKKYGKVHKINIELAREVGKNHSQRAKIEKEQNENYKAKKDAELECEKLGLKINSKNILKLRLFKEQKEFCAYSGEKIKISDLQDEKMLEIDHIYPYSRSFDDSYMNKVLVFTKQNQEKLNKTPFEAFGNDSAKWQKIEVLAKNLPTKKQKRILDKNYKDKEQKDFKDRNLNDTRYIARLVLNYTKDYLDFLPLSDDENTKLNDTQKGSKVHVEAKSGMLTSALRHTWGFSTKDRNNHLHHAIDAVIIAYANNSIVKAFSDFKKEQESNSAELYAKKISELDYKNKRKFFEPFSGFRQKVLDKIDEIFVSKPERKKPSGALHEETFRKEEEFYQSYGGKEGVLKALELGKIRKVNGKIVKNGDMFRVDIFKHKKTNKFYAVPIYTMDFALKVLPNKAVARSKKGEIKDWILMDENYEFCFSLYKDSLILIQTKDMQEPEFVYYNAFTSSTVSLIVSKHDNKFETLSKNQKILFKNANEKEVIAKSIGIQNLKVFEKYIVSALGEVTKAEFRQREDFKK

SEQ ID NO: 899 - protein, 984 aa, Campylobacter jejuni
MARILAFDIGISSIGWAFSENDELKDCGVRIFTKVENPKTGESLALPRRLARSARKRLARRKARLNHLKHLIANEFKLNYEDYQSFDESLAKAYKGSLISPYELRFRALNELLSKQDFARVILHIAKRRGYDDIKNSDDKEKGAILKAIKQNEEKLANYQSVGEYLYKEYFQKFKENSKEFTNVRNKKESYERCIAQSFLKDELKLIFKKQREFGFSFSKKFEEEVLSVAFYKRALKDFSHLVGNCSFFTDEKRAPKNSPLAFMFVALTRIINLLNNLKNTEGILYTKDDLNALLNEVLKNGTLTYKQTKKLLGLSDDYEFKGEKGTYFIEFKKYKEFIKALGEHNLSQDDLNEIAKDITLIKDEIKLKKALAKYDLNQNQIDSLSKLEFKDHLNISFKALKLITPLMLEGKKYDEACNELNLKVAINEDKKDFLPAFNETYYKDEVTNPVVLRAIKEYRKVLNALLKKYGKVHKINIELAREVGKNHSQRAKIEKEQNENYKAKKDAELECEKLGLKINSKNILKLRLFKEQKEFCAYSGEKIKISDLQDEKMLEIDHIYPYSRSFDDSYMNKVLVFTKQNQEKLNKTPFEAFGNDSAKWQKIEVLAKNLPTKKQKRILDKNYKDKEQKDFKDRNLNDTRYIARLVLNYTKDYLDFLPLSDDENTKLNDTQKGSKVHVEAKSGMLTSALRHTWGFSTKDRNNHLHHAIDAVIIAYANNSIVKAFSDFKKEQESNSAELYAKKISELDYKNKRKFFEPFSGFRQKVLDKIDEIFVSKPERKKPSGALHEETFRKEEEFYQSYGGKEGVLKALELGKIRKVNGKIVKNGDMFRVDIFKHKKTNKFYAVPIYTMDFALKVLPNKAVARSKKGEIKDWILMDENYEFCFSLYKDSLILIQTKDMQEPEFVYYNAFTSSTVSLIVSKHDNKFETLSKNQKILFKNANEKEVIAKSIGIQNLKVFEKYIVSALGEVTKAEFIQREDFKK

SEQ ID NO: 900 - protein, 987 aa, Campylobacter jejuni
MARILAFDIGISSIGWAFSENDELKDCGVRIFTKVENPKTGESLALPRRLARSARKRLARRKARLNHLKHLIANEFKLNYEDYQSFDESLAKAYKGSLISPYELRFRALNELLSKQDFARVILHIAKRRGYDDIKNSDDKEKGAILKAIKQNEEKLANYQSVGEYLYKEYFQKFKENSKEFTNVRNKKESYERCIAQSFLKDELKLIFKKQREFGFSFSKKFEEEVLSVAFYKRALKDFSHLVGNCSFFTDEKRVPKNSPLAFMFVALTRIINLLNNLKNTEGILYTKDDLNALLNEVLKNGTLTYKQTKKLLGLSDDYEFKGEKGTYFIEFKKYKEFIKALGEHNLSQDDLNEIAKDITLIKDEIKLKKALAKYDLNQNQIDSLSKLEFKDHLNISFKALKLITPLMLEGKKYDEACNELNLKVAINEDKKDFLPAFNETYYKDEVTNPVVLRAIKEYRKVLNALLKKYGKVHKINIELAREVGKNHSQRAKIEKEQNENYKAKKDAELECEKLGLKINSKNILKLRLFKEQKEFCAYSGEKIKISDLQDEKMLEIDHIYPYSRSFDDSYMNKVLVFTKQNQEKLNQTPFEAFGNDSAKWQKIEVLAKNLPTKKQKRILDKNYKDKEQKNFKDRNLNDTRYIARLVLNYTKDYLDFLPLSDDENTKLNDTQKGSKVHVEAKSGMLTSALRHTWGFSAKDRNNHLHHAIDAVIIAYANNSIVKAFSDFKKEQESNSAELYAKKISELDYKNKRKFFEPFSGFRQKVLDKIDEIFVSKPERKKPSGALHEETFRKEEEFYQSYGGKEGVLKALELGKIRKVNGKIVKNGDMFRVDIFKHKKTNKFYGVPIYTMDFALKVLPNKAVARSKKGEIKDWILMDENYEFCFSLYKDSLILIQTKDMQEPEFVYYNAFTSSTVSLIVSKHDNKFETLSKNQKILFKNANEKEVIAKSIGIQNLKVFEKYIVSALGEVTKAEFRQREDFKNELR

SEQ ID NO: 901 - protein, 984 aa, Campylobacter jejuni
MARILAFDIGISSIGWAFSENDELKDCGVRIFTKVENPKTGESLALPRRLARSARKRLARRKVRLNHLKHLIANEFKLNYEDYQSFDESLAKAYKGSLISPYELRFRALNELLSKQDFARVILHIAKRRGYDDIKNSDDKEKGAILKAIKQNEEKLANYQSVGEYLYKEYFQKFKENSKEFTNVRNKKESYERCIAQSFLKDELKLIFKKQREFGFSFSKKFEEEVLSVAFYKRALKDFSHLVGNCSFFTDEKRAPKNSPLAFMFVALTRIINLLNNLKNTEGILYTKDDLNALLNEVLKNGTLTYKQTKKLLGLSDDYEFKGEKGTYFIEFKKYKEFIKALGEHNLSQDDLNEIAKDITLIKDEIKLKKALAKYDLNQNQIDSLSKLEFKDHLNISFKALKLITPLMLEGKKYDEACNELNLKVAINEDKKDFLPAFNETYYKDEVTNPVVLRAIKEYRKVLNALLKKYGKVHKINIELAREVGKNHSQRAKIEKEQNENYKAKKDAELECEKLGLKINSKNILKLRLFKEQKEFCAYSGEKIKISDLQDEKMLEIDHIYPYSRSFDDSYMNKVLVFTKQNQEKLNKTPFEAFGNDSAKWQKIEVLAKNLPTKKQKRILDKNYKDKEQKDFKDRNLNDTRYIARLVLNYTKDYLDFLPLSDDENTKLNDTQKGSKVHVEAKSGMLTSALRHTWGFSTKDRNNHLHHAIDAVIIAYANNSIVKAFSDFKKEQESNSAELYAKKISELDYKNKRKFFEPFSGFRQKVLDKIDEIFVSKPERKKPSGALHEETFRKEEEFYQSYGGKEGVLKALELGKIRKVNGKIVKNGDMFRVDIFKHKKTNKFYAVPIYTMDFALKVLPNKAVARSKKGEIKDWILMDENYEFCFSLYKDSLILIQTKDMQEPEFVYYNAFTSSTVSLIVSKHDNKFETLSKNQKILFKNANEKEVIAKSIGIQNLKVFEKYIVSALGEVTKAEFRQREDFKK

SEQ ID NO: 902 - protein, 721 aa, Campylobacter jejuni
MFVALTRIINLLNNLKNTEGILYTKDDLNTLLNEVLKNGTLTYKQTKKLLGLSDDYEFKGEKGTYFIEFKKYKEFIKALGDHSLSQDDLNEIAKDITLIKDEIKLKKALAKYDLNQNQIDSLSKLEFKDHLNISFKALKLITPLMLEGKKYDEACNELNLKVAINEDKKDFLPAFNETYYKDEVTNPVVLRAIKEYRKVLNALLKKYGKVHKINIELAREVGKNYSQRAKIEKEQNENYKAKKDAELECEKLGLKINSKNILKLRLFKEQKEFCAYSGEKIKISDLQDEKMLEIDHIYPYSRSFDDSYMNKVLVFTKQNQEKLNQTPFEAFGNDSAKWQKIEVLAKNLPTKKQKRILDKNYKDKEQKDFKDRNLNDTRYIARLVLNYTKDYLDFLPLSDDENTKLNNTQKGSKVYVEAKSGMLTSALRHTWGFSTKDRNNHLHHAIDAVIIAYANNSIVKAFSDFKKEQESNSAELYAKKISELDYKNKRKFFEPFSGFRQKVLDKIDEIFVSKPERKKPSGALHEETFRKEEEFYQSYGGKEGVLKALELGKIRKVNGKIVKNGDMFRVDIFKHKKTNKFYAVPIYTMDFALKVLPNKAVARSKKGEIKDWILMDENYEFCFSLYKDSLILIQTKDMQEPEFVYYNAFTSSTVSLIVSKHDNKFETLSKNQKILFKNANEKEVIAKSIGIQNLKVFEKYIVSALGEVTKAEFRQREDFKK

SEQ ID NO: 903 - protein, 512 aa, Campylobacter jejuni
MHKINIELAREVGKNHSQRAKIEKEQNENYKAKKDAEIECEKLGLKINSKNILKLRLFKEQKEFCAYSGEKIKLSDLQDEKMLEIDHIYPYSRSFDDSYMNKVLVFTKQNQEKLNKTPFEAFGNDSTKWQKIEVLAKNLPEKKQKRILDKNYKDKEQKDFKDRNLNDTRYIARLVLNYTKDYLDFLPLSDDENTKLNDTQKGSKVHVEAKSGMLTSALRHTWGFSAKDRNNHLHHAIDAAIIAYANNSIVKAFSDFKKEQESNSVELYAKKISELDYKNKRKFFEPFSGFRQKVLDKIDEIFVSKPERKKPSGALHEETFRKEEEFYQSYGGKEGVLKALELGKIRKVNGKIVKNGDMFRVDIFKHKKTNKFYAVPIYTMDFALKVLPNKAVARSKKGEIKDWILMDENYEFCFSLYKDSLILIQTKDMQEPELVYFNAFTSSTVSLIVSKHDNKFETLSKNQKILFKNANEKEVIAKSIGIQNLKVFEKYIVSALGEVTKAEFRQREDFKK

SEQ ID NO: 904 - protein, 965 aa, Campylobacter jejuni
MKIIGFNLGIANIGWALRENDEIIDCGVRVFDIPENPKNGNSLALERRENKARMKIVKRKKARMLATKTFLKKELNVDLSKLFLIGSTQSIYELRAKALSSLISKEELSAIILHIAKHRGYDDSALKNENGTIIEALNKNKETMLKFKSVGEYFYKNFVQNKEVKKIRNTTEDYSNSVPRSLLKQELDLILDKQKELGLIKNADFKEKLFEIIFFKRPLKDFSNKIGNCIFFENEKRAAKNTISACEFVALGKVVNLLKSIEKDIGIVYEKDSINEIMSIILDKTSISYKKIRDILNLPQEINFKGLDYSKNNVENSKLVDLKKLNEFKKALGDGFANLDKDILDSIATDITLTKDTATLKEKLKNYNVLNAEQIEKLSELVFNDHINLSLKALKQIIPLMYEGKRYDEACELCNFTIAKNQEKSEYLPLFEKTRFAKDISSPVVIRAICEFRKLLNDIIRRYGSVHKIHLELTRDFGISFSDRKKIIKEIEQNEQSRIKALETIKELKLEETSKNIQIVRLFEDQKGICPYSGLKMDLNRLDELVIDYIRPYNRSLDDSYSNKVLTFKKLSDLKQGKTPFEAFGEDEKLWAEINERIKEYNGKKRFKIFDKFFKDKKPFDFTEQTLQDTRWLTKLVASYLNEYLSFLPISEDENTALGYGEKGSKQHVILSSGMITQMLRNFWYLGFKNHKDYKNNAMDAIIVAFTTNSIIFAFNNFKKELDLAKAEFYANKISESDYLLKRKFLPPFSGFKEQALEKVKNIFVSHSLKIKNKGTLHDLTPLKIKELKNTYGDLDLAVKLGKIRKYNDKYYANANGSLVRADLFVDKKNKFHAVSIYKADFSTKKLPNKTPATTSNGETKEGIEMNENYNFCMSLYKNTPISVKIKGMKEPIICYYHGFNTSGSKITYKKHDNNYHNLSEDEMVVFRKNDKESIAVGKILEIKKYSISPSGELSLIENEERKWF

SEQ ID NO: 905 - protein, 759 aa, Campylobacter jejuni
MLSVAFYKRALKDFSHLVGNCSFFTDEKRAPKNSPLAFMFVALTRIINLLNNLKNTEGILYTKDDLNALLNEVLKNGTLTYKQTKKLLGLSDDYEFKGEKGTYFIEFKKYKEFIKALGEHNLSQDDLNEIAKDITLIKDEIKLKKALAKYDLNQNQIDSLSKLEFKDHLNISFKALKLITPLMLEGKKYDEACNELNLKVAINEDKKDFLPAFNETYYKDEVTNPVVLRAIKEYRKVLNALLKKYGKVHKINIELAREVGKNHSQRAKIEKEQNENYKAKKDAELECEKLGLKINSKNILKLRLFKEQKEFCAYSGEKIKISDLQDEKMLEIDHIYPYSRSFDDSYMNKVLVFTKQNQEKLNKTPFEAFGNDSAKWQKIEVLAKNLPTKKQKRILDKNYKDKEQKDFKDRNLNDTRYIARLVLNYTKDYLDFLPLSDDENTKLNDTQKGSKVHVEAKSGMLTSALRHTWGFSTKDRNNHLHHAIDAVIIAYANNSIVKAFSDFKKEQESNSAELYAKKISELDYKNKRKFFESFSGFRQKVLDKIDEIFVSKPERKKPSGALHEETFRKEEEFYQSYGGKEGVLKALELGKIRKVNGKIVKNGDMFRVDIFKHKKTNKFYAVPIYTMDFALKVLPNKAVARSKKGEIKDWILMDENYEFCFSLYKDSLILIQTKDMQEPEFVYYNAFTSSTVSLIVSKHDNKFETLSKNQKILFKNANEKEVIAKSIGIQNLKVFEKYIVSALGEVTKAEFRQREDFKK

SEQ ID NO: 906 - protein, 984 aa, Campylobacter jejuni
MVRILAFDIGISSIGWAFSENDELKDCGVRIFTKVENPKTGESLALPRRLARSARKRLARRKARLNHLKHLIANEFKLNYEDYQSFDESLAKAYKGSLISPYELRFRALNELLSKQDFARVILHIAKRRGYDDIKNSDDKEKGAILKAIKQNEEKLANYQSVGEYLYKEYFQKFKENSKEFTNVRNKKESYERCIAQSFLKDELKLIFKKQREFGFSFSKKFEEEVLSVAFYKRALKDFSHLVGNCSFFTDEKRAPKNSPLAFMFVALTRIINLLNNLKNTEGILYTKDDLNALLNEVLKNGTLTYKQTKKLLGLSDDYEFKGEKGTYFIEFKKYKEFIKALGEHNLSQDDLNEIAKDITLIKDEIKLKKALAKYDLNQNQIDSLSKLEFKDHLNISFKALKLITPLMLEGKKYDEACNELNLKVAINEDKKDFLPAFNETYYKDEVTNPVVLRAIKEYRKVLNALLKKYGKVHKINIELAREVGKNHSQRAKIEKEQNENYKAKKDAELECEKLGLKINSKNILKLRLFKEQKEFCAYSGEKIKISDLQDEKMLEIDHIYPYSRSFDDSYMNKVLVFTKQNQEKLNKTPFEAFGNDSAKWQKIEVLAKNLPTKKQKRILDKNYKDKEQKDFKDRNLNDTRYIARLVLNYTKDYLDFLPLSDDENTKLNDTQKGSKVHVEAKSGMLTSALRHTWGFSTKDRNNHLHHAIDAVIIAYANNSIVKAFSDFKKEQESNSAELYAKKISELDYKNKRKFFEPFSGFRQKVLDKIDEIFVSKPERKKPSGALHEETFRKEEEFYQSYGGKEGVLKALELGKIRKVNGKIVKNGDMFRVDIFKHKKTNKFYAVPIYTMDFALKVLPNKAVARSKKGEIKDWILMDENYEFCFSLYKDSLILIQTKDMQEPEFVYYNAFTSSTVSLIVSKHDNKFETLSKNQKILFKNANEKEVIAKSIGIQNLKVFEKYIVSALGEVTKAEFRQREDFKK

SEQ ID NO: 907 - protein, 1003 aa, Campylobacter lari]
MRILGFDIGINSIGWAFVENDELKDCGVRIFTKAENPKNKESLALPRRNARSSRRRLKRRKARLIAIKRILAKELKLNYKDYVAADGELPKAYEGSLASVYELRYKALTQNLETKDLARVILHIAKHRGYMNKNEKKSNDAKKGKILSALKNNALKLENYQSVGEYFYKEFFQKYKKNTKNFIKIRNTKDNYNNCVLSSDLEKELKLILEKQKEFGYNYSEDFINEILKVAFFQRPLKDFSHLVGACTFFEEEKRACKNSYSAWEFVALTKIINEIKSLEKISGEIVPTQTINEVLNLILDKGSITYKKFRSCINLHESISFKSLKYDKENAENAKLIDFRKLVEFKKALGVHSLSRQELDQISTHITLIKDNVKLKTVLEKYNLSNEQINNLLEIEFNDYINLSFKALGMILPLMREGKRYDEACEIANLKPKTVDEKKDFLPAFCDSIFAHELSNPVVNRAISEYRKVLNALLKKYGKVHKIHLELARDVGLSKKAREKIEKEQKENQAVNAWALKECENIGLKASAKNILKLKLWKEQKEICIYSGNKISIEHLKDEKALEVDHIYPYSRSFDDSFINKVLVFTKENQEKLNKTPFEAFGKNIEKWSKIQTLAQNLPYKKKNKILDENFKDKQQEDFISRNLNDTRYIATLIAKYTKEYLNFLLLSENENANLKSGEKGSKIHVQTISGMLTSVLRHTWGFDKKDRNNHLHHALDAIIVAYSTNSIIKAFSDFRKNQELLKARFYAKELTSDNYKHQVKFFEPFKSFREKILSKIDEIFVSKPPRKRARRALHKDTFHSENKIIDKCSYNSKEGLQIALSCGRVRKIGTKYVENDTIVRVDIFKKQNKFYAIPIYAMDFALGILPNKIVITGKDKNNNPKQWQTIDESYEFCFSLYKNDLILLQKKNMQEPEFAYYNDFSISTSSICVEKHDNKFENLTSNQKLLFSNAKEGSVKVESLGIQNLKVFEKYIITPLGDKIKADFQPRENISLKTSKKYGLR

SEQ ID NO: 908 - protein, 372 aa, candidate division
DNESAINQIAYILTTQKADEGIRAELDSLPLSDKAKKAIVKIKPTNFKAFGHLSIKALQKITPHILEGMTYDKACEAAGYDFKKQSASLEQITNPVVKRAITQTLKVVRAIERKYGKPYFIKVETARDLAKNFKDRNAIKKENEENQGYNEDIKSIITNGYEASPKTKGGKQLLNHLKEFNVRLNKNADFNGQQIIKVKLYREQQGKCLYSGNPIDFETMLRDDNAYQVDHIVPFSRSNNDGITNKVLVFTEENQKKADRTPFEYFGTDERRWEKFVALVETTYKTRDVKTSDKATNAINYEYNGYAMKKKQNLLLQDYKNDSWNVRALNDTRYITRFIQNYLRQNVDFAEGEEKQRIIAPNGTTTAYLRKR

SEQ ID NO: 909 - protein, 1117 aa, Capnocytophaga ochracea
MKHILGLDLGSNSIGWAFVQQDFENKQGKIIATGSRIIPMDQGILGDFERGNTVSQTAERTTYRSMRRLRERHLLRRERLHRVLHLLGFLPPHYDAQIDFTKRYGKFIDNAEPKIAYNNGNFIFMNSFNEMVEDFKKHQPQLFYKKSNGEESRIPYDWTIYYLRKKALSQKITQQELAWLILHFNQKRGYYQLRGEEETENPNKEVAFHSLKVVDVEAEAPNKKGEIWYTIRLENGWIYRRTSKNPLDDWKGKTRDFIVTTDLNDDGTIKLDKEGKEKRSFRAPDENDWNLLKKKTEHDIDFSGKPVGTYIYDHLLQNPNQKIKGKLVRTIERKYYKDELKAILAKQIALQPELFTETLLADCIRELYRKNETQQQNLLSKDFLHLFVEDIIFYQRPLCSKKSTIANCTLEKRSYIDKETNERKDAPIKVCAKSNPYYQEFRVLQWLQNLRIYEIETDREVTAEFIETPQDYEALFNFLMSQKEIDNEGLLKYFLFAKNPQIKDKAAKSELKKWLTTYRWNYVYDAADNSSKKYPMNETGYELQRYLQKVEGLPANFLTFDITYQLWHLLYSVKDKVEFEKALKKFAKKKQLDKTSFVDSFKNFKPYPNEYGSFSEKAIKKLLPLMRFGNHWDFNRIDVSTQKRIDDLINGVANEDIRTIIREKAEKYQLNSETCFQDLPLWLAQYVVYNRHAEATDIEKWTSVSDLEAYLEDFKQHSLRNPIVEQVVTETLRVVRDIWQQYSGGQANFFDEIHIELGRELKKTAEERKQLSDKNQENENTNLRIKKLLAELKEDASIQNVRPYSLVQQELLKIYEEGVFSSTDEIEEDIQKIRKKVEPTPPEIQRYKLWLEQKYKSPYTGEVISLTKLFTEEYEIEHIIPQSRYYDDSLSNKVICESAVNKLKTNQLGLEFIQNHHGEKVRITANKEVTIFTEEQYKEFVKKHYANNSAKQQKLLLNEIPEKMVARQLNDTRYISKCISEILSKIVRSDEKDEGVNSKNIIPCTGKITTALKQDWGLNDVWNELILPRFERMNQLTQTQLFTSYNDRLQKNLPTVPIEYSQGFQKKRIDHRHHAMDALVIACATREHINYMNNQHALDKSKDKKEKQQSRIDLHPL

SEQ ID NO: 910 - protein, 303 aa, Capnocytophaga ochracea
MSFKQNLRVINKATNYYEKWEEKNGVLVKKKVKQEGTNWAIRKPLHKETVSGKIVLDRKIGKDKILTATRKAVDITFTEKIISSITDTGIQKILLNYLKYKGSPEVAFSAEGLEELNKNIAQYNDGKKHQPIYKVRIFEEGSKFPLGETGAKATKYVEAAKGTNLFFGVYQGKEKRTYATIPLNEVIERQKQGLPSVPERNEKGEPLLFSLSPNDLVYVPMEGEIAETIDFNNLSKEQKERIYKTVSFTGNQCFFVQEAVASPIVNKMEYSPLNKMERDILGIMIKEVCVKLKVDRLGNIIKA

SEQ ID NO: 911 - protein, 1471 aa, Capnocytophaga sp.
MCKYFYIKNFITFVLSKSIIPMKHILGLDLGSNSIGWAFVQQDFENKQGKIIATGSRIIPMDQGILGDFERGNTVSQTAERTTYRSTRRLRERHLLRRERLHRVLHILGFLPPHYDAQIDFTKRYGKFIDNAEPKIAYNNGNFIFMNSFNEMIEDFKKHQPQLFYKKSNGEESKIPYDWTIYYLRKKALSQKITQQELAWLILHFNQKRGYYQLRGEEETENPNKEVAFHSLKVVDVEAEAPNKKGEIWYTIRLENGWIYRRTSKIPLDDWKGKTRDFIVTTDLNDDGTIKVDKEGKEKRSFRAPDENDWNLLKKKTEHDIDFSGKTVGAYIYDHLLQNPNQKIKGKLVRTIERKYYKDELKAILAKQIALQPELFTETLLADCIRELYRKNETQQQNLLSKDFLHLFVEDIIFYQRPLRSKKSTIANCTLEKRSYIDKETNERKDAPIKVCAKSNPYYQEFRVLQWLQNLRIYEIETDREVTAEFIETPQDCEALFNFLMSQKEIDNKGLLKYFLFAKNPQIKDKAAKSELKKWLTTYRWNYVYDAADNSSKKYPMNETGYELQRYLQKVEGLPANFLTFDITYQLWHLLYSVKDKVEFEKALKKFAKKKQLDKTSFVDSFKNFKPYPNEYGSFSEKAIKKLLPLMRFGNHWDFNRIDVSTQKRIDDLINGVANEDIRTIIREKAEKYQLNSETCFQDLPLWLAQYVVYNRHAEATDIEKWTSVSDLEAYLEDFKQHSLRNPIVEQVVTETLRVVRDIWQQYGGGQANFFDEIHIELGRELKKTAEERKQLSDKNQENESTNLRIKKLLAELKEDASIQNVRPYSLVQQELLKIYEEGVFSATDEVEEDIQKIRKKAEPSKADLQRYKLWLEQKYKSPYTGEVISLTKLFTEEYEIEHIIPQSRYYDDSLSNKVICESAVNKLKTNQLGLEFIQNHHGEKVRITANKEVTIFTEEQYKEFVKKHYANNSAKQQKLLLNEIPEKMVARQLNDTRYISKYISEILSKIVRSDEKDEGVNSKNIIPCTGKITTALKQDWGLNDVWNKLILPRFERMNQLTQTQLFTSYNDRLQKNLPTVPIEYSQGFQKKRIDHRHHAMDALVIACATREHINYMNNQHALDKSKDKKEKQQSRIDLRTILCEKKNNNWQFKKPWSTFTQEAKEALEHIVVSFKQNLRVINKATNYYEKWEEKNGVLVKKKVKQEGTNWAIRKPLHKETVSGKIVLDRKIGKDKILTATRKAVDITFTEKIISSITDTGIQKILLNYLKYKGSPEVAFSTEGLEELNKNIAQYNNGKKHQPIYKVRIFEEGSKFPLGETGAKATKYVEAAKGTNLFFGVYQGKGKRTYATIPLNEVIERQKQGLPSVPERNEKGEPLLFSLSPNDLVYVPMEGEIAETIDFNNLSKEQKERIYKTVSFTGNQCFFVQEAVATPIVNKMEYSPLNKMERDILGTMIKEVCIKLKVDRLGNITKA

SEQ ID NO: 912 - protein, 1450 aa, Capnocytophaga sp.
MKHILGLDLGSNSIGWAFVQQDFENKQGKIIATGSRIIPMDQGILGDFERGNTVSQTAERTTYRNTRRLRERHLLRRERLHRVLHILGFLPPHYDSQIDFTKRYGKFIDNAEPKIAYNNGNFIFMNSFNEMIEDFKKYQPQLFYKKSNGEESKIPYDWTIYYLRKKALSQKITQQELAWLILHFNQKRGYYQLRGEEETENPNKEVAFHSLEVVDVEAEAPNKKGEIWYTIRLENGWIYRRTSKIPLDDWKGKTRDFIVTTDLNDDGTIKLDKEGKEKRSFRAPDENDWNLLKKKTEHDIDFSGKTVGAYIYDHLLQNPNQKIKGKLVRTIERKYYKDELKAILAKQIALQPELFTETLLADCIRELYRKNETQQQNLLSKDFLHLFVEDIIFYQRPLRSKKSTIANCTLEKRSYIDKETNERKDTPIKVCAKSNPYYQEFRVLQWLQNLRIYEIETDREVTAEFIETAQDNEALFNFLMSQKEIDNESLLKYFLFAKNPQIKDKVAKSELKKWLTTYRWNYVYDAADNSSKKYPMNETGYELQQYLQKVEGLPANFLTFDITYRLWHLLYSVKDKVEFEKALKKFAQEYQLDEASFVDSFKNFKPYPNEYGSFSEKAIKKLLPLMRFGNHWDFNRIDVSTQKRIDDLINGVANDEIRTIIREKAEKYQLNSETCFQGLPLWLAQYVVYNRHAEAADIEKWTSVNDLEAYLEDFKQHSLRNPIVEQVITETLRVVRDIWQRYGGGQANFFDEIHIELGRELKKTAEERKQLSNRNQENENTNLRIKKLLAELKEDASIQNVRPYSPVQQELLKIYEEGVFSATDEVEEDIQKIRKKAEPTTPEIQRYKLWLEQKYKSPYTGEVISLTKLFTEEYEIEHIIPQSRYYDDSLSNKVICESAVNKLKTNQLGLEFIQNHHGEKVRITANKEVTIFTEEQYKEFVKKHYANNSAKQQKLLLNEIPEKMVARQLNDTRYISKYISEILSKIVRSDEKDEGVNSKNIIPCTGKITTALKQDWGLNDVWNELILPRFERMNQLTQTQLFTSYNDRFQKNLPTVPIEYSQGFQKKRIDHRHHAMDALVIACATREHINYMNNQHALDKSKDKKEKQQSRIDLRTILCEKKNNNWQFKKPWSTFTQEAQEALEHIVVSFKQNLRVINKATNYYEKWEEKNGVLVKKKVKQEGTNWAIRKPLHKETVSGKIVLDRKIGKDKILTATRKSVDITFTEKIISSITDTGIQKILLNYLKYKGSPEVAFSAEGLEELNKNIAQYNDGKKHQPIYKVRIFEEGSKFPLGETGAKATKYVEAAKGTNLFFGVYQGKGKRTYATIPLNEVIERQKQGLPSVPERNEKGEPLLFSLSPNDLVYVPMEGEIAETIDFNNLSKEQKERIYKTVSFTGNQCFFVQEAVATPIVNKIEYSPLNKMERDILGTMIKEVCIKLKVDRLGNITKA

SEQ ID NO: 913 - protein, 1435 aa, Capnocytophaga sp.
MKNILGLDLGTTSIGFAHIVEDENKEKSEIKELGVRIVSLATDEQSDFEKGKSISTNANRTLKHGARLNLDRYQQRRKFLIDLLQKANLITSASILAENGKNTTHSTWQLRAKAVTERIEKEEFARVLLAINKKRGYKNSRKTKTEDEGQAIDGMAIAKCLYDENLTPGQLSLQLLQQNKKLLPDFYRSDLQKEFDLVWNLQKQFYPDILTDSFYKELQGKGKDATSKAFSKRYHFDTAENKGSKESVRLQAYQWRAEAISKQLSKEEVAYVLTEINNNLNNSSGYLGAISDRSKELYFNRQTVGQYLYAQLQENRHNSLKNKVFYRQDYLDEFERIWETQASFHKELTDELKKQIRDVVIFYQRKLKSQKGLVSFCEFESKEIEIEKDGKAITKSIGARVVPKSSPLFQEFKIWQILNNVTCKRKGIRKKKSSAKSTELDLFNEPSQSIFSLDMECKQLLFDELNLKGDLKSDKVLKLLGYSPQEWEINYNQLEGNRTQKSLYEAYLKIIEIEGYEVKDILQIKSTKDDWSLDESPLSASEIRERVKVIFQTLGICTKILYFDPLLPVKEFEQQYSYQLWHLLYSYESDDSTSGNETLYRILEKKYAFKREHATILANVALQDDYGSLSTKAIRKIYPYIKENQYSTACELAGYKHSKLSLTTEELEARELKNIIPLLKKNALRNPVVEKILNQMINVVNALIEKNSERDAEGKITKYFHFDEIRIELARELKKNAQERYEMTQNINKAKLEHQKISEKLQKQFGIKNPTKSDIIRYRLYQELEHNGYKELYTNTYIAPDVLFSKNIDIEHIVPKARVFDDSFSNKTLAFKEFNIKKGESTAFDYITSLNCEGELNQYLTRVENAYKTKSISLTKYKNLLKKASEIGDGFINRDLRDTQYIAKKAKEILFQVTKNVLSTSGSITDRLREDWGLVDVMKELNMPKYQSLGLTEVEERKDGNKVTVIKDWTKRNDHRHHAMDALTVAFTKPSYIQYLNHLNARKDENNKNYSVILAIEKKETIKVPINNGKNKRVFIEPILNFRQVAKKHLEEIFISHKAKNKVVTKNINKPAGTDKQQITLTPRGQLHKETIYGKYQYYVNKEEKVGVKFDERTITKVSNPLYREALLKRLQANDNDPKKAFAGKNALSKNPIYLDEAKTKTLPEKVNLTYLEEDFSIRKDISPDNFKDLKSIEKVIDQGVKRILIKRLQAYDNDPKKAFVDLEKNPIWLNKEKGIAIKRVTISGVSNAQPLHIGKDHLGKTTLNKEGKEVPVDYVSTGNNHHVAIYRDKEGNLQEQIVSFFEAVVRAQQGLPIIDKNYKQAEGWQFMFTMKQNEMFVFPNEATGFNPAEIDLLDPKNKKLISPNLFRVQTISIVKYGNSVVRDFKFRHHLETTLQDDKILQGITFQQIKSLEPLRNIVKVRINHLGDIVNIGEY

SEQ ID NO: 914 - protein, 1432 aa, Capnocytophaga sp.
MKNILGLDLGTTSIGFAHIVEDENKEKSEIKELGVRIVSLTTDEQSDFEKGKSITTNANRTLKHGARLNLDRYQQRRKYLIDLLHKANLITPSSILAENGKNTTHSTWQLRAKAVTERIEKEEFARILLAINKKRGYKSSRKAKTEDEGQAIDGMAIAKRLYDENLTPGQLSLQLLQQNKKLLPDFYRSDLQKEFDLVWNFQKQFYPDILTDIFYKELQGKGKDATSKAFSKRYHFDTAENKGSKESVRLQAYQWRAEAVSKQLSKEEVAYVLTEINNNLNNASGYLGAISDRSKELYFNRQTVGQYLYAQLQENRHNSLKNKVFYRQDYLDEFERIWETQALFHKELTDELKKQIRDVVIFYQRKPKSQKGLISFCEFESKEIEIEKDGKTITKNIGARVVPKSSPLFQEFKIWQILNNVICKRKGIRKKKISAKTTQLDLLNESSQTIFSLDMECKQLLFDELNLKGDLKSDKVLKLLGYSPQEWEINYNQLEGNRTQKALYEAYLKIVEMEAHDVKDILQIKSTKDDWSLDESPLSASEIRESVKAIFQALGICTKILYFDPLLPVKDFEEQDSYQLWHLLYSYESDDSTSGNETLYRILEKKYAFKREHARILANVALQDDYGSLSTKAIRKIYPNIKENQYSTACEMAGYKHSKLSLTTEELEARELKNIIPLLKKNALRNPVVEKILNQMINVVNALIEKNSERDAEGKITKYFHFDEIRIELARELKKNAQKRYEMTQNINKAKSEHQKISEILQKEFGIKNPTKSDIIRYRLYKELEHNGYKELYTNTYIAPDVLFSKNIDIEHIVPKARVFDDSFSNKTLAFKDFNIKKGESTAFDYITSLKNEEKLNQYLARVENAYKTKNISPAKYKNLLKKASEIGDGFINRDLRDTQYIAKKAKEILFQVTKNVLSTSGSITDRLREDWSLVDVMKELNMPKYQSLGLTEVEERKDGNKVTVIKDWTKRNDHRHHAMDALTVAFTKPSYIQYLNHLNARKDENNKNYSVILAIEKKETIKVPTNNGKNKRVFIEPIPNFRQVAKKHLEEIFISHKAKNKVVTKNTNKPAGTNKQQITLTPRGQLHKETIYGKYQYYVNKEEKVGVKFDKETIAKVSNPLYREALLKRLQANDNDPKKAFTGKNALSKNPIYLDEAKTKTLPEKVNLTYLEEDFSVRKKIVPKNPTSKEFVPNLKSIEKVVDEGVRNILIERLRVYNNDPEKAFVDLEKNPIWLNKEKGIAIKRVTISGVNNAQPLHIGKDHLGKTTLNKEGKEIPVDYVSTGNNHHVAIYRDKEGNLQEQIVSFFEAVVRTQQGLPIIDKTYKQEEGWQFLFTMKQNEMFVFPNEATGFNPAEIDLLDPKNKKQISPNLFRVQKIATKDYFFRHHLETNVETDNVLKNTTWKREGLSGLKDIVKVRINHLGDIVSIGEY

SEQ ID NO: 915 - protein, 1426 aa, Capnocytophaga sp.
MKNILGLDLGTTSIGFTHIVEDENKEKSEIKELGVRIVSLTTDEQSDFEKGKSISTNANRTLKHGARLNLDRYQQRRKFLIDLLQKANLITSSSILAENGKNTTHSTWQLRAKAVTERIEKEEFARVLLAINKKRGYKSSRKAKTEDEGQAIDGMAIAKRLYDENLTPGQLSLQLLQQNKKLLPDFYRSDLQKEFDLVWNFQKQFYPDILTDSFYKELQGKGKDATSKAFSKRYHFDTAENKGSRESVRLQAYQWRAEAISKQLSKEEVAYVLTEINNNLNNASGYLGAISDRSKELYFNRQTVGQYLYAQLQENKHNSLKNKVFYRQDYLDEFERIWETQASFHKELTEELKKQIRDVVIFYQRKLKSQKGLISFCEFESKEIEIEKDGKTITKSIGARVVPKSSPLFQEFKIWQILNNVTCKRKGIRKKKSSAKSTELDLFNEPSQTIFSLDMECKQLLFEELNLKGDLKSDKVLKLLGYSPQEWEINYNQLEGNRTQKALYEAYLKIVEMEAHDVKDILQIKSTKDDWALEESPLSASEIRERVKAIFQTLGICTKILYFDPLLPVKEFEEQDSYQLWHLLYSYESDDSTSGNETLYRILEKKYAFKREHATILANVTLQDDYGSLSTKAIRKIYPYIKENQYSTACEKAGYKHSKLSLTTEELEARELKNIIPLLKKNALRNPVVEKILNQMINVVNALIEKNSERDAEGKITKYFHFDEIRIELARELKKNAQERYEMTQNINKAKLEHQKISGILQKEFGIKNPTKSDITRYRLYQELAHNGYNDLYTNTYIPKELLFSKNIDIEHIVSKARVFDDSFSNKTLAFREFNIKKGESTAFDYITSLNNEEELNQYLNRVENAYKTKNISPAKYKNLLKKASEIGDGFINRDLRDTQYIAKKAKEILFQVTKNVLSTSGSITDRLREDWGLVDVMKELNMPKYQSLGLTEVEERKEGNKVTVIKNWTKRNDHRHHAMDALTVAFTKPSYIQYLNHLNARKDKNNKNYSVILAIEEKETIKVPTNNGKNKRVFIEPIPNFRQVAKKHLEEIFISHKAKNKVVTKNTNKPAGTDKQQITLTPRGQLHKETVYGKYQYYVNKEEKIGVKFDKETIAKVSNPVYREALLKRLQANDNDPKKAFAGKNALSKNPIYLDEAKTKTLTEKVNLTYLEEDFSIRKDISPDNFKDLKSIEKVIDQGVKRILIKRLQDYDNDPKKAFVDLEKNPIWLNKEKGIAIKRVTISGVNNAQPLHIGKDHLGKTTLNKEGKEIPVDYVSTGNNHHVAIYRDKEGNLQEQIVSFFEAVVGAQQGLPIVDKTYKQAEGWQFLFTMKQNEMFVFPNEATGFNPAEIDLLDPKNKKQISPNLFRVQKIATKDYFFRHHLETNVDTDNVLKNTTWKREGLSGLKDIVKVRINHLGDIVSIGEY

SEQ ID NO: 916 - protein, 1450 aa, Capnocytophaga sp.
MKRILGLDLGSNSIGWAFVEQDFENKQGKIIATGSRIIPMDQGILGDFEKGNTVSQTAERTTYRSMRRLRERHLLRRERLHRVLHILGFLPPHYDAQIDFTKRYGKFIDNAEPKIAYNNGNFIFMNSFNEMIEDFKKYQPQLFYKKSNGEESKIPYDWTIYYLRKKVLSQKITQQELAWLILHFNQKRGYYQLRGEEETENPNKEVAFHSLKVVDVEAEAPNKKGEIWYTIRLENGWIYRRTSKIPLDDWKGKTRDFIVTTDLNDDGTIKVDKEGKEKRSFRAPDENDWNLLKKKTEHDIDFSGKTVGAYIYDHLLQNPNQKIKGKLVRTIERKYYKDELKAILAKQIALQPELFTETLLADCIRELYRKNETQQQNLLSKDFLHLFVEDIIFYQRPLRSKKSTIANCTLEKRSYIDKETNERKDTFIKVCAKSNPYYQEFRVLQWLQNLRIYEIETDREVTAEFIETAEDYEALFNFLMSQKEIDNEGLLKYFLFAKNPQIKDKVAKSELKKWLTTYRWNYVYDAADNSSKKYPMNETGYDLQRYLQKVEGLPANFLTFDITYRLWHLLYSVKDKVEFEKALKKFAQEYQLDEASFVDSFKNFKPYPNEYGSFSEKAIKKLLPLMRFGNHWDFNRIDVSTQKRIDDLINGVANDEIRTIIREKAEKYQLNSESCFQGLPLWLAQYVVYNRHAEATDIEKWTSVSDLETYLEDFKQHSLRNPIVEQVVTETLRVVRDIWQQYGGGQANFFDEIHIELGRELKKTAEERKQLSNRNQENENTNLRIKKLLAELKEDASIQNVRPYSPVQQELLKIYEEGVFSSTDQVEEDIQKIRKKAEPTTPEIQRYKLWLEQKYKSPYTGEVISLTKLFTEEYEIEHIIPQSRYYDDSLSNKVICESAVNKLKTNQLGLEFIQNHHGEKVRITGNKEVTIFTEEQYKEFVKKHYANNSAKQQKLLLNEIPEKMVARQLNDTRYISKYISEILSKIVRSDEKDEGVNSKNVIPCTGKITTALKQDWGLNDVWNELILPRFERMNQLTQTQLFTSYNDRFQKNLPTVPIEYSQGFQKKRIDHRHHAMDALVIACATREHINYMNNQHALDKNKDKKEKQQSRIDLRTILCEKKNNNWQFKKPWSTFTQETKEALEHIVVSFKQNLRVINKATNYYEKWEEKNGVLVKKKVKQEGTNWAIRKPLHKETVSGKIVLDRKIGKDKILTATRKEVDITFTEKIISSITDTGIQKILLNYLNYKGSPEVAFSAEGLEELNKNIAQYNDGKKHQPIYKVRIFEEGSKFPLGETGAKATKFVEAAKGTNLFFGVYQGKEKRSYATIPLNEVIERQKQGLPSVPERNEKGEPLLFSLSPNDLVYVPMEGEIAETIDFNNLSKEQKERIYKTVSFTGNQCFFVQEAVATPIVNKMEYSPLNKMERDILGTMIKEVCIKLKVDRLGNITKA

SEQ ID NO: 917 - protein, 1437 aa, Capnocytophaga sp.
MKYIKYILGLDIGSNSIGWALIQLDLLQKTKRIIATGSRIIPMDQKVLSDFGKGITISPTAQRTSYRNARHCRERHLLRRERLHRVLHILGFLPTHYDKQIDFSKRYGKFVDNTEPKIAYNERKFLFMDSFQEMLADFKIHQPDLFYTKKNGEESKIPYDWTIYYLRKKALSRKISKEELAWIILNFNQKRGYYQLREEEEENKENDFEIISSKIISVIKKDKDKKYNKYWYDIILENGLVYQAAFYNDFVYNWINQDREFIIERISLKNGTEKVKLSYLPTFDEIDKMDKKEQDKYYKKIKIKTENSIGNKTVGCYIYDHILQNPNEKIKGKLVRTIERKYYKEELKAILEKQVALQPELFTDQLFADCIRELYSKNEAQQRNLAARDFVHLFVEDIIFYQRSLRRQKSTLANCSLESRSYIDKDSHTRKEAPLKVCPKSNPYYQEFRVLQWLQNLKIYEIDTDQEVTHEFIKTLEDKQQFFDFLMNQKEIDCEELLKYFLNQTYPNAREKALKSELKKWKDTYRWNYVYDIGEKSSKKYPMNETRYELKRHLEKVANLPDDFLSSEVEYLLWHLIYSVKDKVAYEKGLKTFAQKHHLDKDSFVESFKKFKPYPSEYGSFSEKAIRKLLPLMRFGSYWDFNHIDKNTQKRIEDLITGVENEEIRTILREKAEKYQLEKETDFQDLPLWLAQYIVYNRHAEASSLEKWTSVNDLETYLNEFKQYSLRNPIVEQVVMETLRVVRDIWQQYGQGQASFFDEIHIELGRELKKTAKEREKLSKQNQKNEDINLSIKEKLKELEKYNTRAYSITHQEKYKLWLEQKHISPYTGQIISPENLFTDNYEIEHIIPQSRFFDDSLSNKVVCESIVNKAPYKDRQLGLEFIKNQGGRIVKELSTENKTIKIFTEEQYRTFIKEHYSNNPEKTKKLLLEEIPEKMVARQMNDTCYISKFISEILSKIVRSDEQDEGVHSKNVILCTGKITSALKQDWGVNDVWNDLILPRFERMNDLTQSTLFTTYNEKYQKYLPTVPMEYSNGFQKKRIDHRHHAMDAIIIACATREHINYINNQHALEKGKDKKEKQKEHDKLREKLCIKKDNKGSEENYSWIFKKPWDTFTQEVQAALEGIVVSFKQNLRVINKATNYYERWVEENGKYIKKMVKQEGTNWAIRKPLHEETISGKIYLDREEITKNDILTATRKTVDSSFDEKRIKKITDTGIQKILLNYLKYKGSPEIAFSPEGLEELNKNLSIYNDGKPHKPIYKVRIYEKGSGRFALGEKGRKYKKYVQGAPNLYFGIYQGANKRSFATIPLNEVIERQKQGRPSIPEYNEKGDPLLFSLSPNDLVYVPVEGEIIEDIDFQNLSKEQKERIYNVNDFSSTCYFTPNRIAKAIFPKEVDLQRKGDKLPGSYDTKTASLEGIQIKEVCIKLKIDRLGNISKA

SEQ ID NO: 918 - protein, 1140 aa, Catellicoccus marimammalium
MKNMTKVNVGLDVGISSAGWSVINAETNQILESGVRLFSGSDADENVNRRNQRQGRRLFRRRKLRIQEAKKYLENVFQLKDIEPKDEWNPYEIRVRALNEKVSKEELSIALLNIVKHRGISYELEDVTDEEGTNTQSFQSGLDYNRRLLKTKTVGEIQYDRLQKYGQVRGQIQTEDGLLINIFPTKNYVEEVERILETQKKYHPEIDDVFIEKIISFVTRKREYFVGPGNEKSRTDYGIYRENGETLDNLFEILIGKDKFYPEEYRAAGSSYTAQIFNLLNDLNNLRIPTTEDHHLTKAQKEEIITELKNTSRLSGGMLKLISKVTKAPKEEISGYRKDEKDKPDLHSLAYYRKQKNMLEKEGIQIADFSEELLDELATMMTLNTEPGEIRKQLNKITNQYDILTPEVIEVLVKNHTAFVATSNHKWHRFSLKLMKEFIPELLETSKEQSTILCERGFIQNRASYLDENHHFNYAELRENLYNPVVRKSTCEMLKVFTAIQEKYPNIQNVIVELPRETNEDEQKRKIKKINDNNAKRKKEILKEAQAQSGLSEEALEEKLLKTKGLYLKLMLWYEQEGKCVYSGQEIPLSDLLQNKGGYEVDHIIPISISFDDRLCNKVLVRQQLNSQKSNQTPFEYMTTHTDGHLSFHELKELVGKNKRFSKEKRELLLAEIYSNDIETRKRFINRNLVDTSYTARIVLNALQQYKKENQLSMNVSVVRGAMTNILRKKVKLDKTRETFHHHAIDASLMAVIPNIEFFKERKEWLPKSANEEVVEVEVSEEETMPEKEFKVKMRLPESFIQDVQILQRNSFAKEEVSGPQTRERNLKIKFSHQVDQKMNRKVADDTIYGTRQAQLGKDKKEETYVIGKIKDIYNYDEYVRFKKRYDKNKESFLMYHHDPQTFEKLEEILAQYPEYIEDEKGKKKKVSPFALYREENGPVTKYAKKNNGPVIKQLKYYDSKLNRKIDISHKYSTKNRQVVLQSLKPYRTDVYRNQDTGEYTLVGIDQNDGKFVNGHYGIPKSRYEEIKANNKLSEHDEFVFSLYKNSMVKVIDENGESIVVRYLSRSMPNRKNNAEIKPVEKYQFEDGEVVPVYGKCRKQMQTVFVKKGWTLLKGNTDILGNTYFVEKESENPKKMIDDK

SEQ ID NO: 919 - protein, 1419 aa, Chryseobacterium sp.
MMIKNILGLDLGTNSIGWALIKQNFENKYGEILGMGSRIIPMSQDVLGEFGKGNSVSQTAARTGYRGVRRLRERFLLRRERLHRVLNVLNFLPEHYASQIDFEKRFGKFKYETEPKLAYNNDGFFFKNSFDEMLGDFKDHQFHLLENGRKVPYDWTIYYLRKKALSQKIEKEELAWILLNFNQKRGYYQLRGEDFEEEKDRVFVRLKVDRVVDSGENIKGKILYDVYFENGWKYEKQIVKTEDWIGRTKEFIVTESILKNGDTKRTFKAVDSEKDWIAIKTKTEQEIDKSHKTVGAYIYEALLQNPKQKIKGKLVRTIERKFYREELKKILERQKEFHPELQSDDLYNDCIRELYRNNEAHQITLSKKDFVHLLLNDLIFYQRPLRSQKSSVSNCTLEFRKYKDENGVEHAQYLKTIPKSNPYYQEFRVWQWMFNLNIYRKDDDTNVTKEFLSSTEDYETLFEFLNNRKEVDQKALLRHFKLNEKTHRWNYVEDKKYPCNETKTMISTRLEKVENYPSDFLTREMEQNIWHIIYSVNDKIEYEKALKSFAHKNNLDENSFFEAFKKFPPFKSEYGSFSEKAIKKLLPLLRLGKYWNWESIDRKSQGRIEKIITGEFDGNIKDKVREKAIHLTAENDFQGLQLWLAQYIVYGRHSEASMIGKWNSADDLEEFLKGFKQHSLRNPIVEQVITETLRVVKDIWLKYGNGAKDFFSEIHIELGREMKQTKDERVDATKRITENENTNLRIKALLAEMMNDNSVENIRPYSPMQQEILKIYEDGILKSDIEIDDDILKISKTAQPSSSDLKRYKLWLEQRYKSPYTGQIIPLNKLFTSEYEIEHIIPQSRYFDDSFSNKIICESAVNKLKDNYIGLGFIKQFGGMIVECGFGKSVEIFKAEEYEDFVKKHYANNRSKRNKLLLEEIPEKMIDRQLNDTRHISKYISGVLSNIVRQEDGTDEGVNSKNIVPGNGKITTQLKQDWGLNDVWNELILPRFERMNQLTNSTDFTSWNKNHQKFLPTVPIEFSKGFSKKRIDHRHHAMDALVIACATKDHINLLNNQSAKSDTKRYDLKRKLMKFERVVYSHSKTGEKIEKEVPKQFLKPWDNFTVDAKNKMETIIVSFKQNLRVINKATNHYEKWIEKDGIKRKELIKQEGTNWAIRKPMHKETVSGKVDLPGIKIPKGKILTATRKSLDTSFDLKTINSITDTGIQKILKNYLEFKGSSELAFSPEGIEDMNKNIEKFNDGKPHQSINKVRIFELGSKFSVGQTGNKKDKYVEAAKGTNLFFAVYEDKNGKRSYETIPLNEVIERQKQGLDSVSFKNKEDFLLCPNDLVYVPSEDELENIYNIDFKNLTTEKTGNIYKVVSFSGNQIFFIRQDIAISIVNKAEFSTLNKMERAIDGSMIKENCIKLKIDRLGNIAKI

SEQ ID NO: 920 - protein, 1065 aa, Clostridium perfringens
MNKDINYALGLDIGITSVGWAVINLDLNRIEDLGVRIFNAAENPKDGSSLALPRRLARGRRRLLRRKAYRVERVRKLIVKNNILTKEELEGLFKNKEVIDVWEARVKGLDYKLSREEWAKILINFCKRRGFKSNRKNETKDKEAGQILSSISYNIEKMKETNSRTIGEYIYNEVKNSDDSYAPLRNKFGEYKMCVSRDVLREEIHTLFEKQRELGNNFASDEIEDKYFEIFNSQRPFSNFEDLEKLVGFCTFERKKHKRAPKHCISSEEFTLYEGINKLSIIKDGEKRKLSEEERTLVVNEAFNKKEIKYTTLRKLLGLSEDELFSTLTYSIDKDISKTENTKFVSLKGYHEIKRAIEKGVSKKAWQDIENNRNLLNDIAYVLTLGKTDDEIEKQLRLRNVPEELFESLLDMSFSKFNNLSIYALEKILPFMKEGYQYNEACEKAGYNFKAIYEGVRTKKLPVIEIDEIVNPVVNRALAQTRKVINSVIDKYGSPVRINIELARDLAKNFKDRKLIEKEQKENRANLDKIRENLRELMDKEPTAVEVLKYRLWEQQRGECAYTQSQIALERLFSPGYCEIDHIIPFSRSFDDSLSNKILVLGSENQRKGNKIPYEYFGEDSERWNSFEIWVKGSYLNYKKKANLLKKKFTEEEQRDWKARNLQDTKYICRYISNFVNNRLEFKESENKQKVITVNGRATAYLRSRWGLNKVREDGDKHHALDAAVVGVTTQGMVQKISKYSKAHELYTVRKNDEFVDVETGECVDVDEYKEIRKDILPRPWRGFSEELKLRLSDNPLEELKKLPIETYNEEFIKENVKPIFVSRVPFRKISGKLFKETIYSERAFKDGYFVSKKSLVDLKRGDLDNFYNYECDKKLYDAISERMKEFNYNGKKAFESPFRKPTKSGKEGPVVRSVKIKSAAPFKDGIPMNEGLVAKEGMVRIDIYEKEGKYFVVPVYRYQLAKGIVPKRAAIAGKSELKWPIMDQTYNFKFSIFKNDLIEIKYAKKDGYFGYYDGFDRHTASLVIENHDNSDRYRGIGVKTGVVEFNKYEVDVLGNYHKVNLGGN

SEQ ID NO: 921 - protein, 1099 aa, Corynebacterium accolens
MSLSYRVGIDVGTYSLGCTAIEVDDNDQPVNILSSVSLIHDSGLDPDQQKRAVTRLASSGVARRTRRLYRRRRRRMINLEKFLTSQGWETRPFEHYSDPYLPWNARVALVNGYISDDAQRGMYLSIAFRHIANHRGWRNPYWKVSSLYSPDKPSDAFEQIRKELEESTGHKIPETVTVGQLISFAQFGKDRLRGGGKKKDEKKPQEQVNQAVISARLHQIDHAREINEICRVQKIDDALRKQILDLVFAAESPKGAQIGRVGKDPLQPKLPRALKASDAFQQYRIVALAGNLRIYRDGVSTPLDRDEKLIVFNYLINLSHKEEPSWLKVAEVLNIDRGQLHGTATMTDDGERAGAAPPVHDTNRTILGCKIKPLVHWWEGANDDERAAMLKALSNSEVEDFDSPAGAQTQAFFANLDESEQEKLDSLHLPIGRAAYSEDTLMRLTSRMLDENLDLYEARLAEFDIPKDWAPPAPRIGEPVGNPAVDRVLKGVARWLEAAADEWGAPKSVVIEHVRDGFISKSKANEIDRANNARHKRNRELFKQMQENLGIDGKLRSSDLWRYQSVQRQNCQCAYCGSPITYTTCEMDHIVPRAGEGSTNTRDNLVATCHRCNLAKKNIPFAVWAAQTNIPGVSVKEALDRTRHWSEDSGMTSKDFKKFRKNVCDRLKRTVVDEPLDARSMESVAWMANELRGRVAQRFQEENTVVNVYRGELTAEARRAAGISDKLRFIDGTGKSRLDRRHHAVDAAVVAFTQNYVAETLAIRSNKKREAQLLQAAEQWKEFTGSDAEHRAAWNAWLPKMQKLAVLLQKALDEDRIAVTSNLRLRLGNGRAHEDSIGELKTIRVGDAISVTDIDRASSEALWCALTREPDFDENNGLPENPDRRIRIHGTWYDAEDDIEVFPVGAGAIKVRGGYAELSRFHHARIYKIPGKKAPVYCMLRVYNADLIRHRHEDLFSVEIKPQTMSVRQAEPKLRKALAENTAEYLGWLVTDDELVIDTSNFNTGQIAEMQSELGQVRRWRLDGFYSPSTLRLRPLQMSAEGLREDTSIGAKKIIDRPGWLPAINKLFGEGHVTVVRRDALGRARLTSNAHLPISWKAE

SEQ ID NO: 922 - protein, 1084 aa, Corynebacterium diphtheriae
MKYHVGIDVGTFSVGLAAIEVDDAGMPIKTLSLVSHIHDSGLDPDEIKSAVTRLASSGIARRTRRLYRRKRRRLQQLDKFIQRQGWPVIELEDYSDPLYPWKVRAELAASYIADEKERGEKLSVALRHIARHRGWRNPYAKVSSLYLPDGPSDAFKAIREEIKRASGQPVPETATVGQMVTLCELGTLKLRGEGGVLSARLQQSDHAREIQEICRMQEIGQELYRKIIDVVFAAESPKGSASSRVGKDPLQPGKNRALKASDAFQRYRIAALIGNLRVWVDGEKRILSVEEKNLVFDHLVNLTPKKEPEWVTIAEILGIDRGQLIGTATMTDDGERAGARPPTHDTNRSIVNSRIAPLVDWWKTASALEQHAMVKALSNAEVDDFDSPERAKVQAFFADLDDDVHAKLDSLHLPVGRAAYSEDTLVRLTRRMLSDGVDLYTARLQEFGIEPSWTPPTPRIGEPVGNPAVDRVLKTVSRWLESATKTWGAPERVIIEHVREGFVTEKRAREMDGDMRRRAARNAKLFQEMQEKLNVQGKPSRADLWRYQSVQRQNCQCAYCGSPITFSNSEMDHIVPRAGQGSTNTRENLVAVCHRCNQSKGNTPFAIWAKNTSIEGVSVKEAVERTRHWVTDTGMRSTDFKKFTKAVVERFQRATMDEEIDARSMESVAWMANELRSRVAQHFASHGTTVRVYRGSLTAEARRASGISGKLEFLDGVGKSRLDRRHHAIDAAVIAFTSDYVAETLAVRSNLKQSQAHRQEAPQWREFTGKDAEHRATWRVWCQKMEKLSALLTEDLRDDRVVVMSNVRLRLGNGSAHEETIGKLSKVKLGSQLSVSDIDKASSEALWCALTREPDFDPKDGLPANPERHIRVNGTHVYAGDNIGLFPVSAGSIALRGGYAELGSSFHHARVYKITSGKKPAFAMLRVYTIDLLPYRNQDLFSVELKPQTMSMRQAEKKLRDALATGNAEYLGWLVVDDELVVDTSKIATDQVKAVEAELGTIRRWRVDGFFGDTRLRLRPLQMSKEGIKKESAPELSKIIDRPGWLPAVNKLFSEGNVTVVRRDSLGRVRLESTAHLPVTWKVQ

SEQ ID NO: 923 - protein, 1084 aa, Corynebacterium diphtheriae
MKYHVGIDVGTFSVGLAAIEVDDAGMPIKTLSLVSHIHDSGLDPDEIKSAVTRLASSGIARRTRRLYRRKRRRLQQLDKFIQRQGWPVIELEDYSDPLYPWKVRAELAASYIADEKERGEKLSVALRHIARHRGWRNPYAKVSSLYLPDGPSDAFKAIREEIKRASGQPVPETATVGQMVTLCELGTLKLRGEGGVLSARLQQSDHAREIQEICRMQEIGQELYRKIIDVVFAAESPKGSASSRVGKDPLQPGKNRALKASDAFQRYRIAALIGNLRVRVDGEKRILSVEEKNLVFDHLVNLAPKKEPEWVTIAEILGIDRGQLIGTATMTDDGERAGARPPTHDTNRSIVNSRIAPLVDWWKTASALEQHAMVKALSNAEVDDFDSPEGAKVQAFFADLDDDVHAKLDSLHLPVGRAAYSEDTLVRLTRRMLADGVDLYTARLQEFGIEPSWTPPAPRIGEPVGNPAVDRVLKTVSRWLESATKTWGAPERVIIEHVREGFVTEKRAREMDGDMQRRAARNAKLFQEMQEKLNVQGKPSRADLWRYQSVQRQNCQCAYCGSPITFSNSEMDHIVPRAGQGSTNTRENLVAVCHRCNQSKGNTPFAIWAKNTSIEGVSVKEAVERTRHWVTDTGMRSPDFKKFTKAVVERFQRATMDEEIDARSMESVAWMANELRSRVAQHFASHGTTVRVYRGSLTAEARRASGISGKLKFFDGVGKSRLDRRHHAIDAAVIAFTSDYVAETLAVRSNLKQSQAHRQEAPQWREFTGKDAEHRAAWRVWCQKMEKLSALLTEDLRDDRVVVMSNVRLRLGNGSAHKETIGKLSKVKLGSQLSVSDIDKASSEALWCALTREPDFDPKEGLPANPERHIRVNGTHVYAGDNIGLFPVSAGSIALRGGYAELGSSFHHARVYKITSGKKPAFAMLRVYTIDLLPYRNQDLFSVELKPQTMSMRQAEKKLRDALATGNAEYLGWLVVDDELVVDTSKIATDQVKAVEAELGTIRRWRVDGFFSPSKLRLRPLQMSKEGIKKESAPELSKIIDRPGWLPAVNKLFSDGNVTVVRRDSLGRVRLESTAHLPVTWKVQ

SEQ ID NO: 924 - protein, 1084 aa, Corynebacterium diphtheriae
MKYHVGIDVGTFSVGLAAIEVDDAGMPIKTLSLVSHIHDSGLDPDKIKSAVTRLASSGIARRTRRLYRRKRRRLQQLDKFIQRQGWPVIELEDYSDPLYPWKVRAELAASYIADEKERGEKLSVALRHIARHRGWRNPYAKVSSLYLPDEPSDAFKAIREEIKRASGQPVPETATVGQMVTLCELGTLKLRGEGGVLSARLQQSDHAREIQEICRMQEIGQELYRKIIDVVFAAESPKGSASSRVGKDPLQPGKNRALKASDAFQRYRIAALIGNLRVRVDGEKRILSVEEKNLVFDHLVNLAPKKEPEWVTIAEILGIDRGQLIGTATMTDDGERAGARPPTHDTNRSIVNSRIAPLVDWWKTASALEQHAMVKALSNAEVDDFDSPEGAKVQAFFADLDDDVHAKLDSLHLPVGRAAYSEDTLVRLTRRMLADGVDLYTARLQEFGIEPSWTPPAPRIGEPVGNPAVDRVLKTVSRWLKSATKTWGAPERVIIEHVREGFVTEKRAREMDGDMRRRAARNAKLFQEMQEKLNVQGKPSRADLWRYQSVQRQNCQCAYCGSPITFSNSEMDHIVPRAGQGSTNTRENLVAVCHRCNQSKGNTPFAIWAKNTSIEGVSVKEAVERTRHWVTDTGMRSTDFKKFTKAVVERFQRATMDEEIDARSMESVAWMANELRSRVAQHFASHGTTVRVYRGSLTAEARRASGISGKLEFLDGVGKSRLDRRHHAIDAAVIAFTSDYVAETLAVRSNLKQSQAHRQEAPQWREFTGKDAEHRAAWRVWCQKMEKLSALLTEDLRDDRVVVMSNVRLRLGNGSAHEETIGKLSKVKLGSQLSVSDIDKASSEALWCALTREPDFDPKDGLPANPERHIRVNGTHVYAGDNIGLFPVSAGSIALRGGYAELGSSFHHARVYKITSGKKPAFAMLRVYTIDLLPYRNQDLFSVELKPQTMSMRQAEKKLRDALATGNAEYLGWLVVDDELVVDTSKIATDQVKAVEAELGTIRRWRVDGFFGDTRLRLRPLQMSKEGIKKESAPELSKIIDRPGWLPAVNKLFSEGNVTVVRRDSLGRVRLESTAHLPVTWKVQ

SEQ ID NO: 925 - protein, 1084 aa, Corynebacterium diphtheriae
MKYHVGIDVGTFSVGLAAIEVDDAGMPIKTLSLVSHIHDSGLDPDKIKSAVTRLASSGIARRTRRLYRRKRRRLQQLDKFIQRQGWPVIELEDYSDPLYPWKVRAELAASYIADEKERGEKLSVALRHIARHRGWRNPYAKVSSLYLPDEPSDAFKAIREEIKRASGQPVPETATVGQMVTLCELGTLKLRGEGGVLSARLQQSDHAREIQEICRMQEIGQELYRKIIDVVFAAESPKGSASSRVGKDPLQPGKNRALKASDAFQRYRIAALIGNLRVRVDGEKRILSVEEKNLVFDHLVNLAPKKEPEWVTIAEILGIDRGQLIGTATMTDDGERAGARPPTHDTNRSIVNSRIAPLVDWWKTASALEQHAMVKALSNAEVDDFDSPEGAKVQAFFADLDDDVHAKLDSLHLPVGRAAYSEDTLVRLTRRMLADGVDLYTARLQEFGIEPSWTPPAPRIGEPVGNPAVDRVLKTVSRWLESATKTWGAPERVIIEHVREGFVTEKRAREMDGDMRRRAARNAKLFQEMQEKLNVQGKPSRADLWRYQSVQRQNCQCAYCGSPITFSNSEMDHIVPRAGQGSTNTRENLVAVCHRCNQSKGNTPFAIWAKNTSIEGVSVKEAVERTRHWVTDTGMRSTDFKKFTKAVVERFQRATMDEEIDARSMESVAWMANELRSRVAQHFASHGTTVRVYRGSLTAEARRASGISGKLEFLDGVGKSRLDRRHHAIDAAVIAFTSDYVAETLAVRSNLKQSQAHRQEAPQWREFTGKDAEHRAAWRVWCQKMEKLSALLTEDLRDDRVVVMSNVRLRLGNGSAHEETIGKLSKVKLGSQLSVSDIDKASSEALWCALTREPDFDPKDGLPANPERHIRVNGTHVYAGDNIGLFPVSAGSIALRGGYAELGSSFHHARVYKITSGKKPAFAMLRVYTIDLLPYRNQDLFSVELKPQTMSMRQAEKKLRDALATGNAEYLGWLVVDDELVVDTSKIATDQVKAVEAELGTIRRWRVDGFFGDTRLRLRPLQMSKEGIKKESAPELSKIIDRPGWLPAVNKLFSEGNVTVVRRDSLGRVRLESTAHLPVTWKVQ

SEQ ID NO: 926 - protein, 1084 aa, Corynebacterium diphtheriae
MKYHVGIDVGTFSVGLAAIEVDDAGMPIKTLSLVSHIHDSGLDPDKMKSAVTRLASSGIARRTRRLYRRKRRRLQQLDKFIQRQGWPVIELEDYSDPLYPWKVRAELAASYIADEKERGEKLSVALRHIARHRGWRNPYAKVSSLYLPDEPSDAFKSIREEIKRASGQPVPETATVGQMVTLCELGTLKLRGEGGVLSARLQQSDHAREIQEICRMQEIGQELYRKIIDVVFAAESPKGSASSRVGKDPLQPGKNRALKASDSFQRYRIAALISNLRVRVDGEKRILSVEEKNLVFDHLVNLAPKKEPEWVTIAEILGIDRGQLIGTATMTDDGERAGARPPTHDTNRSIVNSRIAPLVDWWKTASALEQHAMVKALSNAEVDDFDSPEGAKVQAFFADLDDDVHAKLDSLHLPVGRAAYSEDTLVRLTRRMLADGVDLYTARLQEFGIEPSWTPPAPRIGEPVGNPAVDRVLKTVSRWLESATKTWGAPERVIIEHVRDGFVTEKRAREMDGDMRRRAARNAKLFQEMQEKLNVQGKPSRADLWRYQSVQRQNCQCAYCGSPITFSNSEMDHIVPRAGQGSTNTRENLVAVCHRCNQSKGNTPFAIWAKNTSIEGVSVKEAVERTRHWVTDTGMRSTDFKKFTKAVVERFQRATMDEEIDARSMESVAWMANELRSRVAQHFASHGTTVRVYRGSLTAEARRASGISGKLEFLDGVGKSRLDRRHHAIDAAVIAFTSDYVAETLAVRSNLKQSQAHRQEAPQWREFTGKDAEHRAAWRVWCQKMEKLSALLTEDLRDDRVVVMSNVRLRLGNGSAHEETIGKLSKVKLGSQLSVSDIDKASSEALWCALTREPDFDPKDGLPANPERHIRVNGTHVYAGDNIGLFPVSAGSIALRGGYAELGSSFHHARVYKITSGKKPAFAMLRVYTIDLLPYRNQDLFSVELKPQTMSMRQAEKKLRDALATGNAEYLGWLVVDDELVVDTSKIATDQVKAVEAELGTIRRWRVDGFFGDTRLRLRPLQMSKEGIKKELAPELSKIIDRPGWLPAVNKLFSEGNVTVVRRDSLGRVRLESTAHLPVTWKVQ

SEQ ID NO: 927 - protein, 1084 aa, Corynebacterium diphtheriae
MKYHVGIDVGTFSVGLAAIEVDDAGMPIKTLSLVSHIHDSGLDPDKMKSAVTRLASSGIARRTRRLYRRKRRRLQQLDKFIQRQGWPVIELEDYSDPLYPWKVRAELAASYIADEKERGEKLSVALRHIARHRGWRNPYAKVSSLYLPDEPSDAFKSIREEIKRASGQPVPETATVGQMVTLCELGTLKLRGEGGVLSARLQQSDHAREIQEICRMQEIGQELYRKIIDVVFAAESPKGSASSRVGKDPLQPGKNRALKASDAFQRYRIAALIGNLRVRVDGEKRILSVEEKNLVFDHLVNLAPKKEPEWVTIAEILGIDRGQLIGTATMTDDGERAGARPPTHDTNRSIVNSRIAPLVDWWKTASALEQHAMVKALSNAEVDDFDSPEGAKVQAFFADLDDDVHAKLDSLHLPVGRAAYSEDTLVRLTRRMLADGVDLYTARLQEFGIEPSWTPPAPRIGEPVGNPAVDRVLKTVSRWLESATKTWGAPERVIIEHVREGFVTEKRAREMDGDMRRRAARNAKLFQEMQEKLNVQGKPSRADLWRYQSVQRQNCQCAYCGSPITFSNSEMDHIVPRAGQGSTNTRENLVAVCHRCNQSKGNTPFAIWAKNTSIEGVSVKEAVERTRHWVTDTGMRSTDFKKFTKAVVERFQRATMDEEIDARSMESVAWMANELRSRVAQHFASHGTTVRVYRGSLTAEARRASGISGKLEFLDGVGKSRLDRRHHAIDAAVIAFTSDYVAETLAVRSNLKQSQAHRQEAPQWREFTGKDAEHRAAWRVWCQKMEKLSALLTEDLRDDRVVVMSNVRLRLGNGSAHEETIGKLSKVKLGSQLSVSDIDKASSEALWCALTREPDFDPKDGLPANPERHIRVNGTHVYAGDNIGLFPVSAGSIALRGGYAELGSSFHHARVYKITSGKKPAFAMLRVYTIDLLPYRNQDLFSVELKPQTMSMRQAEKKLRDALATGNAEYLGWLVVDDELVVDTSKIATDQVKAVEAELGTIRRWRVDGFFGDTRLRLRPLQMSKEGIKKESAPELSKIIDRPGWLPAVNKLFSEGNVTVVRRDSLGRVRLESTAHLPVTWKVQ

SEQ ID NO: 928 - protein, 1084 aa, Corynebacterium diphtheriae
MKYHVGIDVGTFSVGLAAIEVDDAGMPIKTLSLVSHIHDSRLDPDKIKSAVTRLASSGIARRTRRLYRRKRRRLQQLDKFIQRQGWPVIELEDYSDPLYPWKVRAELAASYIADEKERGEKLSVALRHIARHRGWRNPYAKVSSLYLPDEPSDAFKAIREEIKRASGQPVPETATVGQMVTLCELGTLKLRGEGGVLSARLQQSDHAREIQEICRMQEIGQELYRKIIDVVFAAESPKGSASSRVGKDPLQPGKNRALKASDAFQRYRIAALIGNLRVRVDGEKRILSVEEKNLVFDHLVNLAPKKEPEWVTIAEILGIDRGQLIGTATMTDDGERAGARPPTHDTNRSIVNSRIAPLVDWWKTASALEQHAMVKALSNAEVDDFDSPEGAKVQAFFADLDDDVHAKLDSLHLPVGRAAYSEDTLVRLTRRMLADGVDLYTARLQEFGIEPSWTPPAPRIGEPVGNPAVDRVLKTVSRWLESATKTWGAPERVIIEHVREGFVTEKRAREMDGDMRRRAARNAKLFQEMQEKLNIQGKPSRADLWRYQSVQRQNCQCAYCGSPITFSNSEMDHIVPRAGQGSTNTRENLVAVCHRCNQSKGNTPFAIWAKNTSIEGVSVKEAVERTRHWVTDTGMRSTDFKKFTKAVVERFQRVTMDEEIDARSMESVAWMANELRSRVAQHFASRGTTVRVYRGSLTAEARRASGISGKLEFLDGVGKSRLDRRHHAIDAAVIAFTSDYVAETLAVRSNLKQSQAHRQEAPQWREFTGKDAEHRAAWRVWCQKMEKLSALLTEDLRDDRVVVMSNVRLRLGNGSAHEETIGKLSKVKLGSQLSVSDIDKASSEALWCALTREPDFDPKDGLPANPERHIRVNGTHVYAGDNIGLFPVSAGSIALRGGYAELGSSFHHARVYKITSGKKPAFAMLRVYTIDLLPYRNQDLFSVELKPQTMSMRQAEKKLRDALATGNAEYLGWLVVDDELVVDTSKIATDQVKAVEAELGTIRRWRVDGFFGDTRLRLRPLQMSKEGIKKESAPELSKIIDRPGWLPAVNKLFSEGNVTVVRRDSLGRVRLESTAHLPVTWKVQ

SEQ ID NO: 929 - protein, 1069 aa, Corynebacterium matruchotii
MAAIAIDDDGKPTEILSAISLIHDSGVDPDSAKSAATRLATSGIARRTRRLYRRKRKRLAKLDKFISSQGWPLKEFEKYEDPFYPWRVRAELATTAITDQQELGEKLSIALRHIARHRGWRNPYSKVTALYTVTEPSDAFLAMQEECAKQLGRTIPETITVGQLVTGMNLGKTRLRGENSLLAARPRQSDNANEIHTIAKVQGLSNELVRQIIDHVFAAESPKGSAAEQVGKDPLQPTKKRALKASDAFQQYRIAALIGNLRIRGGKGNRRLTTEETRLVFDYLRSLPAKQEPTWQLVAEQLKIDRGNLVGTAIMTDDGERAGAKPPVHDTNRIMENTKIKPLATWWKSADADARAAMVKALSNAEVDDFDSQAGAQVQEFFFGISDEDQEKLDGLHLPIGRAAYSEDTLDRLTKRMIGEGMDLYEARQAEFKISNDWAPPAPEIGERVGNPAVDRVLKATARWLNAAERQWGAPKSVNIEHVRAAFMSESSARELDRDNQQRAKRNVKVVAEMQEKLGIEGRPSRADVWRFQSIQRQNGKCAYCGAEISFKNSEMDHIIPQVGEGSTNTRDNLVAVCRECNSSKSNIAFAVWAENTSRPGVSVQKAIERTHHWVTDSGLRKPEFDKFRKQVCDRLRRKATDEPIDARSLESVAWMANELRSRIAQKFKDGDTKVRVYKGALTAEARRASGISGKLEFVDGKGKSRLDRRHHAVDAAVVAFTSNYVAETLALRSNMKFDQELRRKAPQWREFTGSDHVHQVEWTKWKYRMQALAELLNNALVQDRIVVMHNLRLRLGNGAAHEDTIGKLTRLKVGDAISTTDIDRASSEALWCALTRDPDYDPKTGLPENPNRTIRIHGTHLTASDEITVFPVAAASIPIRDGFAKLGSNYHHVRLFRVPSGKKYKYCLMQVYTVDLLKFRKEDLFTVELKPQTISVRTCEALLRKALANGTAEYLGWLVSDDELLIDTSSFDTPGIVKLREEYGPVNRWRLAGLTSVTRLNLRPLYLSKEGLKPNVNPEIKKIIDNRSWIITVNKLFSSGHVKIIRRDALGRPRLHSAAHLPICWEVK

SEQ ID NO: 930 - protein, 210 aa, Diplosphaera colitermitum
MSDILDKPIVLSLNRAWQVIGHRTVKQALVALNGGNADLPPALGLDIAYPKFDDGAWNFDRPLFLNPLPWSEWIELPVRDFDFAITTPRLRIRVPTVIVATQFAKMPVRIPRLTREAIFERDGGVCQYTGEHVGKHGGNLDHVVPRDRGGRDSFENLVWAKREINSLKANRLPHEAGLRLLRRPKAPAPLPASMTIREARHPDWRHFLTP

SEQ ID NO: 931 - protein, 1332 aa, Dolosigranulum pigrum
MQKNYTIGLDIGTNSVGWAVMKDDYTLIRKRMKVLGNTDIKKIKKNFWGVRLFDEGETAKETRLKRGTRRRYQRRRNRLIYLQDIFQQPMLAIDENFFHRLDDSFFVPDDKSYDRHPIFGSLEEEVAYHNTYPTIYHLRKHLADNPEKADLRLVYTALAHIVKYRGHFLIEGELNTENTSISETFEQFLDTYSDIFKEQLVGDISKVEEILSSKQSRSRKHEQIMALFPNENKLGNFGRFMMLIVGNTSNFKPVFDLDDEYKLKLSDETYEEDLDTLLGMTDDVFLDVFMAAKNVYDAVEMSAIISTDTGNSKAVLSNQMINFYDEHKVDLAQLKQFFKTHLPDKYYECFSDPSKNGYAGYIDGKTNQEDFYKYIEKVMKTIKSDKKDYFLDKIDREVFLRKQRSFYNSVIPHQIHLQEMQAILDRQSQYYPFLAENRDKIESLVTFRIPYYVGPLTVSDQSEFAWMERQSDEPIRPWNFDEIVNKERSAEKFIERMTNMDTYLLEEKVLPKRSLLYQTFEVYNELTKVRYTNEQGKTEKLNRQQKAEIIETLFKQKNRVREKDIANYLEQYGYVDGTDIKGVEDKFNASLSTYNDLAKIDGAKAYLDDPEYADVWEDIIKILTIFEDKAMRKKQLQTYSDTLSPEILKKLERKHYTGWGRFSKKLINGLRDEGSNKTILDYLKSDEGSSGPTNRNFMQLIRDNTLSFKKKIEDAQTIEDTTHIYDTVAELPGSPAIKKGIRQALKIVEEIIDIIGYEPENIVVEMARESQTTKKGKDLSKERLEKLTEAIKEFDGPSDVKVKDLKNENLRNDRLYLYYLQNGRDMYTNEPLDINNLSKYDIDHIIPQSFTTDNSIDNKVLVSRTKNQGNKSDDVPSINIVHKMKPFWRQLHKAGLISDRKFKNLTKAEHGGLTEADRAHFLNRQLVETRQITKHVANLLDSQYNTAEEQRINIVLLKSSMTSRFRKEFKLYKVREINDYHHGHDAYLNAVVATTIMKVYPNLKPQFVYGQYKKTSMFKEEKATARKHFYSNITKFFKKEKVVNEETGEILWDTERHLSTIKRVLSWKQMNIVKKVEKQKGQLWKETIYPKGDSSKLIPVKEGMDPQKYGGLSQVSEAFAVVITHEKGKKKQLKSDLISIPIVDQKAYEQHPTAYLEEAGYNNPTVLHELFKYQLFELEDGSRRMIASAKEFQKGNQMVLPLELVELLYHANRYDKVKFPDSIEYVHDNLAKFDDLLEYVIDFSNKYINADKNVQKIQKIYKEHGTEDVELTVESFVNLMTFTAMGAPATFKFYGESITRSRYTSITEFRGSTLIFQSITGLYETRYKLEDN

SEQ ID NO: 932 - protein, 921 aa, Enterococcus faecalis
MIPHQIHLAELQAIIHRQAAYYPFLKENQEKIEQLVTFRIPYYVGPLSKGDASTFAWLKRQSEEPIRPWNLQETVDLDQSATAFIERMTNFDTYLPSEKVLPKHSLLYEKFMVFNELTKISYTDDRGIKANFSGKEKEKIFDYLFKTRRKVKKKDIIQFYRNEYNTEIVTLSGLEEDQFNASFSTYQDLLKCGLTRAELDHPDNAEKLEDIIKILTIFEDRQRIRTQLSTFKGQFSAEVLKKLERKHYTGWGRLSKKLINGIYDKESGKTILGYLIKDDGVSKHYNRNFMQLINDSQLSFKNAIQKAQSSEHEETLSETVNELAGSPAIKKGIYQSLKIVDELVAIMGYAPKRIVVEMARENQTTSTGKRRSIQRLKIVEKAMAEIGSNLLKEQPTTNEQLRDTRLFLYYMQNGKDMYTGDELSLHRLSHYDIDHIIPQSFMKDDSLDNLVLVGSTENRGKSDDVPSKEVVKDMKAYWEKLYAAGLISQRKFQRLTKGEQGGLTLEDKAHFIQRQLVETRQITKNVAGILDQRYNANSKEKKVQIITLKASLTSQFRSIFGLYKVREVNDYHHGQDAYLNCVVATTLLKVYPNLAPEFVYGEYPKFQTFKENKATAKAIIYTNLLRFFTEDEPRFTKDGEILWSNSYLKTIKKELNYHQMNIVKKVEVQKGGFSKESIKPKGPSNKLIPVKNGLDPQKYGGFDSPIVAYTVLFTHEKGKKPLIKQEILGITIMEKTRFEQNRILFLEEKGFLRPRVLMKLPKYTLYEFPEGRRRLLASAKEAQKGNQMVLPEHLLTLLYHAKQCLLPNQSESLTYVEQHQPEFQEILERVVDFAEVHTLAKSKVQQIVKLFEANQTADVKEIAASFIQLMQFNAMGAPSTFKFFQKDIERARYTSIKEIFDATIIYQSTTGLYETRRKVVD

SEQ ID NO: 933 - protein, 1337 aa, Enterococcus faecalis; identical to SEQ ID NO: 110

SEQ ID NO: 934 - protein, 1337 aa, Enterococcus faecalis
MKKDYVIGLDIGTNSVGWAVMTEDYQLVKKKMPIYGNTEKKKIKKNFWGVRLFEEGHTAEDRRLKRTARRRISRRRNRLRYLQAFFEEAMTALDENFFARLQESFLVPEDKKWHRHPIFAKLEDEVAYHETYPTIYHLRKKLADSSEQADLRLIYLALAHIVKYRGHFLIEGKLSTENISVKEQFQQFMIIYNQTFVNGESRLVSAPLPESVLIEEELTEKASRTKKSEKVLQQFPQEKANGLFGQFLKLMVGNKADFKKVFGLEEEAKITYASESYEEDLEGILAKVGDEYSDVFLAAKNVYDAVELSTILADSDKKSHAKLSSSMIVRFTEHQEDLKNFKRFIRENCPDEYDNLFKNEQKDGYAGYITHAGKVSQLKFYQYVKKIIQDIAGAEYFLEKIAQENFLRKQRTFDNGVIPHQIHLAELQAIIHRQAAYYPFLKENQEKIEQLVTFRIPYYVGPLSKGDANTFAWLKRQSEEPIRPWNLQETVDLDQSATAFIERMTNFDTYLPSEKVLPKHSLLYEKFMVFNELTKISYTDDRGIKANFSGKEKEKIFDYLFKTRRKVKKKDIIQFYRNEYNTEIVTLSGLEEDQFNASFSTYQDLLKCGLTRAELDHPDNAEKLEDIIKILTIFEDRQRIRTQLSTFKGQFSAEVLKKLERKHYTGWGRLSKKLINGIYDKESGKTILDYLIKDDGVSKHYNRNFMQLINDSQLSFKNAIQKAQSSEHEETLSETVNELAGSPAIKKGIYQSLKIVDELVAIMGYAPKRIVVEMARENQTTSTGKRRSIQRLKIVEKAMAEIGSNLLKEQPTTNEQLRDTRLFLYYMQNGKDMYTGDELSLHRLSHYDIDHIIPQSFMKDDSLDNLVLVGSTENRGKSDDVPSKEVVKDMKAYWEKLYAAGLISQRKFQRLTKGEQGGLTLEDKAHFIQRQLVETRQITKNVAGILDQRYNAKSKEKKVQIITLKASLTSQFRSIFGLYKVREVNDYHHGQDAYLNCVVATTLLKVYPNLAPEFVYGEYPKFQTFKENKATAKAIIYTNLLRFFTEDEPRFTKDGEILWSNSYLKTIKKELNYHQMNIVKKVEVQKGGFSKESIKPKGPSNKLIPVKNGLDPQKYGGFDSPIVAYTVLFTHEKGKKPLIKQEILGITIMEKTRFEQNPILFLEEKGFLRPRVLMKLPKYTLYQFPEGRRRLLASAKEAQKGNQMVLPEHLLTLLYHAKQCLLPNQSESLAYVEQHQPEFQEILERVVDFAEVHTLAKSKVQQIVKLFEANQTADVKEIAASFIQLMQFNAMGAPSTFKFFQKDIERARYTSIKEIFDATIIYQSTTGLYETRRKVVD

SEQ ID NO: 935 - protein, 1337 aa, Enterococcus faecalis
MKKDYVIGLDIGTNSVGWAVMTEDYQLVKKKMPIYGNTEKKKIKKNFWGVRLFEEGHTAEDRRLKRTARRRISRRRNRLRYLQAFFEEAMTALDENFFARLQESFLVPEDKKWHRHPIFAKLEDEVAYHETYPTIYHLRKKLADSSEQADLRLIYLALAHIVKYRGHFLIEGKLSTENISVKEQFQQFMIIYNQTFVNGESRLVSTPLPESVLIEEELTEKASRTKKSEKVLQQFPQEKANGLFGQFLKLMVGNKADFKKVFGLEEEAKITYASESYEEDLEGILAKVGDEYSDVFLAAKNVYDAVELSTILADSDKKSHAKLSSSMIVRFTEHQEDLKNFKRFIRENCPDEYDNLFKNEQKDGYAGYITHAGKVSQLKFYQYVKKIIQDIAGAEYFLEKIAQENFLRKQRTFDNGVIPHQIHLAELQAIIHRQAAYYPFLKENQEKIEQLVTFRIPYYVGPLSKGDASTFAWLKRQSEEPIRPWNLQETVDLDQSATAFIERMTNFDTYLPSEKVLPKHSLLYEKFMVFNELTKISYTDDRGIKANFSGKEKEKIFDYLFKTRRKVKKKDIIQFYRNEYNTEIVTLSGLEEDQFNASFSTYQDLLKCGLTRAELDHPDNAEKLEDIIKILTIFEDRQRIRTQLSTFKGQFSAEVLKKLERKHYTGWGRLSKKLINGIYDKESGKTILDYLVKDDGVSKHYNRNFMQLINDSQLSFKNAIQKAQSSEHEETLSETVNELAGSPAIKKGIYQSLKIVDELVAIMGYAPKRIVVEMARENQTTSTGKRRSIQRLKIVEKAMAEIGSNLLKEQPTTNEQLRDTRLFLYYMQNGKDMYTGDELSLHRLSHYDIDHIIPQSFMKDDSLDNLVLVGSTENRGKSDDVPSKEVVKDMKAYWEKLYAAGLISQRKFQRLTKGEQGGLTLEDKAHFIQRQLVETRQITKNVAGILDQRYNAKSKEKKVQIITLKASLTSQFRSIFGLYKVREVNDYHHGQDAYLNCVVATTLLKVYPNLAPEFVYGEYPKFQTFKENKATAKAIIYTNLLRFFTEDEPRFTKDGEILWSNSYLKTIKKELNYHQMNIVKKVEVQKGGFSKESIKPKGPSNKLIPVKNGLDPQKYGGFDSPIVAYTVLFTHEKGKKPLIKQEILGITIMEKTRFEQNPILFLEEKGFLRPRVLMKLPKYTLYEFPEGRRRLLASAKEAQKGNQMVLPEHLLTLLYHAKQCLLPNQSESLAYVEQHQPEFQEILERVVDFAEVHTLAKSKVQQIVKLFEANQTADVKEIAASFIQLMQFNAMGAPSTFKFFQKDIERARYTSIKEIFDATIIYQSTTGLYETRRKVVD

SEQ ID NO: 936 - protein, 1337 aa, Enterococcus faecalis
MKKDYVIGLDIGTNSVGWAVMTEDYQLVKKKMPIYGNTEKKKIKKNFWGVRLFEEGHTAEDRRLKRTARRRISRRRNRLRYLQAFFEEAMTDLDENFFARLQESFLVPEDKKWHRHPIFAKLEDEVAYHETYPTIYHLRKKLADSSEQADLRLIYLALAHIVKYRGHFLIEGKLSTENISVKEQFQQFMIIYNQTFVNGESRLVSAPLPESVLIEEELTEKASRTKKSEKVLQQFPQEKANGLFGQFLKLMVGNKADFKKVFGLEEEAKITYASESYEEDLEGILAKVGDEYSDVFLAAKNVYDAVELSTILADSDKKSHAKLSSSMIVRFTEHQEDLKKFKRFIRENCPDEYDNLFKNEQKDGYAGYIAHAGKVSQLKFYQYVKKIIQDIAGAEYFLEKIAQENFLRKQRTFDNGVIPHQIHLAELQAIIHRQAAYYPFLKENQEKIEQLVTFRIPYYVGPLSKGDASTFAWLKRQSEEPIRPWNLQETVDLDQSATAFIERMTNFDTYLPSEKVLPKHSLLYEKFMVFNELTKISYTDDRGIKANFSGKEKEKIFDYLFKTRRKVKKKDIIQFYRNEYNTEIVTLSGLEEDQFNASFSTYQDLLKCGLTRAELDHPDNAEKLEDIIKILTIFEDRQRIRTQLSTFKGQFSAEVLKKLERKHYTGWGRLSKKLINGIYDKESGKTILGYLIKDDGVSKHYNRNFMQLINDSQLSFKNAIQKAQSSEHEETLSETVNELAGSPAIKKGIYQSLKIVDELVAIMGYAPKRIVVEMARENQTTSTGKRRSIQRLKIVEKAMAEIGSNLLKEQPTTNEQLRDTRLFLYYMQNGKDMYTGDELSLHRLSHYDIDHIIPQSFMKDDSLDNLVLVGSTENRGKSDDVPSKEVVKDMKAYWEKLYAAGLISQRKFQRLTKGEQGGLTLEDKAHFIQRQLVETRQITKNVAGILDQRYNANSKEKKVQIITLKASLTSQFRSIFGLYKVREVNDYHHGQDAYLNCVVATTLLKVYPNLAPEFVYGEYPKFQTFKENKATAKAIIYTNLLRFFTEDEPRFTKDGEILWSNSYLKTIKKELNYHQMNIVKKVEVQKGGFSKESIKPKGPSNKLIPVKNGLDPQKYGGFDSPIVAYTVLFTHEKGKKPLIKQEILGITIMEKTRFEQNPILFLEEKGFLRPRVLMKLPKYTLYEFPEGRRRLLASAKEAQKGNQMVLPEHLLTLLYHAKQCLLPNQSESLAYVEQHQPEFQEILERVVDFAEVHTLAKSKVQQIVKLFEANQTADVKEIAASFIQLMQFNAMGAPSTFKFFQKDIERARYTSIKEIFDATIIYQSTTGLYETRRKVVD

SEQ ID NO: 937 - protein, 936 aa, Enterococcus faecalis
MKKDYVIGLDIGTNSVGWAVMTEDYQLVKKKMPIYGNTEKKKIKKNFWGVRLFEEGHTAEDRRLKRTARRRISRRRNRLRYLQAFFEEAMTDLDENFFARLQESFLVPEDKKWHRHPIFAKLEDEVAYHETYPTIYHLRKKLADSSEQADLRLIYLALAHIVKYRGHFLIEGKLSTENISVKEQFQQFMIIYNQTFVNGESRLVSAPLPESVLIEEELTEKASRTKKSEKVLQQFPQEKANGLFGQFLKLMVGNKADFKKVFGLEEEAKITYASESYEEDLEGILAKVGDEYSDVFLAAKNVYDAVELSTILADSDKKSHAKLSSSMIVRFTEHQEDLKKFKRFIRENCPDEYDNLFKNEQKDGYAGYIAHAGKVSQLKFYQYVKKIIQDIAGAEYFLEKIAQENFLRKQRTFDNGVIPHQIHLAELQAIIHRQAAYYPFLKENQEKIEQLVTFRIPYYVGPLSKGDASTFAWLKRQSEEPIRPWNLQETVDLDQSATAFIERMTNFDTYLPSEKVLPKHSLLYEKFMVFNELTKISYTDDRGIKANFSGKEKEKIFDYLFKTRRKVKKKDIIQFYRNEYNTEIVTLSGLEEDQFNASFSTYQDLLKCGLTRAELDHPDNAEKLEDIIKILTIFEDRQRIRTQLSTFKGQFSAEVLKKLERKHYTGWGRLSKKLINGIYDKESGKTILGYLIKDDGVSKHYNRNFMQLINDSQLSFKNAIQKAQSSEHEETLSETVNELAGSPAIKKGIYQSLKIVDELVAIMGYAPKRIVVEMARENQTTSTGKRRSIQRLKIVEKAMAEIGSNLLKEQPTTNEQLRDTRLFLYYMQNGKDMYTGDELSLHRLSHYDIDHIIPQSFMKDDSLDNLVLVGSTENRGKSDDVPSKEVVKDMKAYWEKLYAAGLISQRKFQRLTKGEQGGLTLEDKAHFIQRQLVETR

SEQ ID NO: 938 - protein, 1337 aa, Enterococcus faecalis
MKKDYVIGLDIGTNSVGWAVMTEDYQLVKKKMPIYGNTEKKKIKKNFWGVRLFEEGHTAEDRRLKRTARRRISRRRNRLRYLQAFFEEAMTDLDENFFARLQESFLVPEDKKWHRHPIFAKLEDEVAYHETYPTIYHLRKKLADSSEQADLRLIYLALAHIVKYRGHFLIEGKLSTENISVKEQFQQFMIIYNQTFVNGESRLVSAPLPESVLIEEELTEKASRTKKSEKVLQQFPQEKANGLFGQFLKLMVGNKADFKKVFGLEEEAKITYASESYEEDLEGILAKVGDEYSDVFLAAKNVYDAVELSTILADSDKKSHAKLSSSMIVRFTEHQEDLKKFKRFIRENCPDEYDNLFKNEQKDGYAGYIAHAGKVSQLKFYQYVKKIIQDIAGAEYFLEKIAQENFLRKQRTFDNGVIPHQIHLAELQAIIHRQAAYYPFLKENQEKIEQLVTFRIPYYVGPLSKGDASTFAWLKRQSEEPIRPWNLQETVDLDQSATAFIERMTNFDTYLPSEKVLPKHSLLYEKFMVFNELTKISYTDDRGIKANFSGKEKEKIFDYLFKTRRKVKKKDIIQFYRNEYNTEIVTLSGLEEDQFNASFSTYQDLLKCGLTRAELDHPDNAEKLEDIIKILTIFEDRQRIRTQLSTFKGQFSAEVLKKLERKHYTGWGRLSKKLINGIYDKESGKTILDYLVKDDGVSKHYNRNFMQLINDSQLSFKNAIQKAQSSEHEETLSETVNELAGSPAIKKGIYQSLKIVDELVAIMGYAPKRIVVEMARENQTTSTGKRRSIQRLKIVEKAMAEIGSNLLKEQPTTNEQLRDTRLFLYYMQNGKDMYTGDELSLHRLSHYDIDHIIPQSFMKDDSLDNLVLVGSTENRGKSDDVPSKEVVKDMKAYWEKLYAAGLISQRKFQRLTKGEQGGLTLEDKAHFIQRQLVETRQITKNVAGILNQRYNANSKEKKVQIITLKASLTSQFRSIFGLYKVREVNDYHHGQDAYLNCVVATTLLKVYPNLAPEFVYGEYPKFQTFKENKATAKAIIYTNLLRFFTEDEPRFTKDGEILWSNSYLKTIKKELNYHQMNIVKKVEVQKGGFSKESIKPKGPSNKLIPVKNGLDPQKYGGFDSPVVAYTVLFTHEKGKKPLIKQEILGITIMEKTRFEQNPILFLEEKGFLRPRVLMKLPKYTLYEFPEGRRRLLASAKEAQKGNQMVLPEHLLTLLYHAKQCLLPNQSESLAYVEQHQPEFQEILERVVDFAEVHTLAKSKVQQIVKLFEANQTADVKEIAASFIQLMQFNAMGAPSTFKFFQKDIERARYTSIKEIFDATIIYQSTTGLYETRRKVVD

SEQ ID NO: 939 - protein, 1337 aa, Enterococcus faecalis
MKKDYVIGLDIGTNSVGWAVMTEDYQLVKKKMPIYGNTEKKKIKKNFWGVRLFEEGHTAEDRRLKRTARRRISRRRNRLRYLQAFFEEAMTDLDENFFARLQESFLVPEDKKWHRHPIFAKLEDEVAYHETYPTIYHLRKKLADSSEQADLRLIYLALAHIVKYRGHFLIEGKLSTENISVKEQFQQFMIIYNQTFVNGESRLVSAPLPESVLIEEELTEKASRTKKSEKVLQQFPQEKANGLFGQFLKLMVGNKADFKKVFGLEEEAKITYASESYEEDLEGILAKVGDEYSDVFLAAKNVYDAVELSTILADSDKKSHAKLSSSMIVRFTEHQEDLKKFKRFIRENCPDEYDNLFKNEQKDGYAGYIAHAGKVSQLKFYQYVKKIIQDIAGAEYFLEKIAQENFLRKQRTFDNGVIPHQIHLAELQAIIHRQAAYYPFLKENQEKIEQLVTFRIPYYVGPLSKGDASTFAWLKRQSEEPIRPWNLQETVDLDQSATAFIERMTNFDTYLPSEKVLPKHSLLYEKFMVFNELTKISYTDDRGIKANFSGKEKEKIFDYLFKTRRKVKKKDIIQFYRNEYNTEIVTLSGLEEDQFNASFSTYQDLLKCGLTRAELDHPDNAEKLEDIIKILTIFEDRQRIRTQLSTFKGQFSAEVLKKLERKHYTGWGRLSKKLINGIYDKESGKTILGYLIKDDGVSKHYNRNFMQLINDSQLSFKNAIQKAQSSEHEETLSETVNELAGSPAIKKGIYQSLKIVDELVAIMGYAPKRIVVEMARENQTTSTGKRRSIQRLKIVEKAMAEIGSNLLKEQPTTNEQLRDTRLFLYYMQNGKDMYTGDELSLHRLSHYDIDHIIPQSFMKDDSLDNLVLVGSTENLGKSDDVPSKEVVKDMKAYWEKLYAAGLISQRKFQRLTKGEQGGLTLEDKAHFIQRQLVETRQITKNVAGILDQRYNANSKEKKVQIITLKASLTSQFRSIFGLYKVREVNDYHHGQDAYLNCVVATTLLKVYPNLAPEFVYGEYPKFQTFKENKATAKAIIYTNLLRFFTEDEPRFTKDGEILWSNSYLKTIKKELNYHQMNIVKKVEVQKGGFSKESIKPKGPSNKLIPVKNGLDPQKYGGFDSPIVAYTVLFTHEKGKKPLIKQEILGITIMEKTRFEQNPILFLEEKGFLRPRVLMKLPKYTLYEFPEGRRRLLASAKEAQKGNQMVLPEHLLTLLYHAKQCLLPNQSESLAYVEQHQPEFQEILERVVDFAEVHTLAKSKVQQIVKLFEANQTADVKEIAASFIQLMQFNAMGAPSTFKFFQKDIERARYTSIKEIFDATIIYQSTTGLYETRRKVVD

SEQ ID NO: 940 - protein, 1337 aa, Enterococcus faecalis
MKKDYVIGLDIGTNSVGWAVMTEDYQLVKKKMPIYGNTEKKKIKKNFWGVRLFEEGHTAEDRRLKRTARRRISRRRNRLRYLQAFFEEAMTDLDENFFARLQESFLVPEDKKWHRHPIFAKLEDEVAYHETYPTIYHLRKKLADSSEQADLRLIYLALAHIVKYRGHFLIEGKLSTENTSVKEQFQQFMVIYNQTFVNGESRLVSAPLPESVLIEEELTEKASRTKKSEKVLQQFPQEKANGLFGQFLKLMVGNKADFKKVFGLEEEAKITYASESYEEDLEGILAKVGDEYSDVFLAAKNVYDAVELSTILADSDKKSHAKLSSSMIVRFTEHQEDLKKFKRFIRENCPDEYDNLFKNEQKDGYAGYIAHAGKVSQLKFYQYVKKIIQDIAGAEYFLEKIAQENFLRKQRTFDNGVIPHQIHLAELQAIIHRQAAYYPFLKENQEKIEQLVTFRIPYYVGPLSKGDASTFAWLKRQSEEPIRPWNLQETVDLDQSATAFIERMTNFDTYLPSEKVLPKHSLLYEKFMVFNELTKISYTDDRGIKANFSGKEKEKIFDYLFKTRRKVKKKDIIQFYRNEYNTEIVTLSGLEEDQFNASFSTYQDLLKCGLTRAELDHPDNAEKLEDIIKILTIFEDRQRIRTQLSTFKGQFSAEVLKKLERKHYTGWGRLSKKLINGIYDKESGKTILDYLVKDDGVSKHYNRNFMQLINDSQLSFKNAIQKAQSSEHEETLSETVNELAGSPAIKKGIYQSLKIVDELVAIMGYAPKRIVVEMARENQTTSTGKRRSIQRLKIVEKAMAEIGSNLLKEQPTTNEQLRDTRLFLYYMQNGKDMYTGDELSLHRLSHYDIDHIIPQSFMKDDSLDNLVLVGSTENRGKSDDVPSKKVVKKMKAYWEKLYAAGLISQRKFQRLTKGEQGGLTLEDKAHFIQRQLVETRQITKNVAGILDQRYNAKSKEKKVQIITLKASLTSQFRSIFGLYKVREVNDYHHGQDAYLNCVVATTLLKVYPNLAPEFVYGEYPKFQAFKENKATAKTIIYTNLMRFFTEDEPRFTKDSEILWSNSYLKTIKKELNYHQMNIVKKVEVQKGGFSKESIKPKGPSNKLIPVKNGLDPQKYGGFDSPVVAYTVLFTHEKGKKPLIKQEILGITIMEKTRFEQNPILFLEEKGFLRPRVLMKLPKYTLYEFPEGRRRLLASAKEAQKGNQMVLPEHLLTLLYHAKQCLLPNQSESLAYVEQHQPEFQEILERVVDFAEVHTLAKSKVQQIVKLFEANQTADVKEIAASFIQLMQFNAMGAPSTFKFFQKDIERARYTSIKEIFDATIIYQSTTGLYETRRKVVD

SEQ ID NO: 941 - protein, 1150 aa, Enterococcus faecalis
MYSIGLDLGISSVGWSVIDERTGNVIDLGVRLFSAKNSEKNLERRTNRGGRRLIRRKTNRLKDAKKILAAVGFYEDKSLKNSCPYQLRVKGLTEPLSKGEIYKVTLHILKKRGISYLDEDDTEAAKESQDYKEQVRENAQLLTKYTPGQIQLQRLKENNRVKTGINAQGNYQLNVFKVSAYANELATILKTQQAFYPNELTDDWIALFVQPGIAEEAGLIYRKRPYYHGPGNEANNSPYGRWSDFKKTGQPATNIFDKLIGKDFQGELRASGLSLSAQQYNLLNDLTNLKIDGEIPLSPEQKEYILAELMTKEFTRFGVNDVVKLLGVKKERLSGWRLDKKGKPEIHTLKGYRNWRKIFAESGIDLAMLPTETIDCLAKILTLNTEREGIENTLAFELPELAESVKLLVLDRYKELSQSVSTQAWHRFSLKTLHLLIPELMNATSEQNTLLEQFQLKSDVRKRYSEYKKLPTKDVLTEIYNPTVNKTVSQAFKVIDALLVKYGKEQIRYITIEMPRDDNEEDEKKRIKELHAKNSQRKNDSQSYFMQKSGWSQEKFQTTIQKNRRFLAKLLYYYEQDGICAYTGLSISPELLVSDSTEIDHIIPISISLDDSINNKVLVLSKANQVKGQQTPYDAWMDGSFKKINGKFSNWDDYQKWVESRHFSHKKENNLLETRNIFDSEQVEKFLARNLNDTRYASRLVLNTLQSFFANQETKVRVVNGSFTHTLRKKWGADLDKTRETHHHHAVDATLCAVTPFVKVSRYHYAVKEETGEKVMREIDFETGEIVDEMSYREFKKSKKYERKTYQVKWPNFREQLKPVNLHPRIKFSHQVDRKANRKLSDATIYSVREKTEVKTLKSGKQKITTDEYTIGKIKDIYTVDGWEAFKKKQDKLLMKDLDEKTYERLLSIAETTPDFQEVEEKNGKVKRVKRSPFAVYCEENDIPAIRKYAKKNNGPLIRSLKYYDGKLNKHINITKDSQGRPVEKTKNGRKVTLQSLKPYRYDIYQDLETKAYYTVQLYYSDLRFVEGKYGITEKEYMKKVAEQTKGQVVRFCFSLQKNDGLEIEWKDSQRYDVRFYNFQSANSINFKGLEQEMMPAENQFKQKPYNNGAINLNIAKYGKEGKKLRKFNTDILGKKHYLYYEKEPKNIIK

SEQ ID NO: 942 - protein, 1150 aa, Enterococcus faecalis
MYSIGLDLGISSVGWSVIDERTGNVIDLGVRLFSAKNSEKNLERRTNRGGRRLIRRKTNRLKDAKKILAAVGFYEDKSLKNSCPYQLRVKGLTEPLSKGEIYKVTLHILKKRGISYLDEDDTEAAKESQDYKEQVRKNAQLLTKYTPGQIQLQRLKENNRVKTGINAQGNYQLNVFKVSAYANELATILKTQQAFYPNELTDDWIALFVQPGIAEEAGLIYRKRPYYHGPGNEANNSPYGRWSDFKKTGQPATNIFDRLIGKDFQGELRASGLSLSAQQYNLLNDLTNLKIDGEIPLSPEQKEYILAELMTKEFTRFGVNDVAKLLGVKKERLSGWRLDKKGKPEIHTLKGYRNWRKIFAESGIDLATLPTETIDCLAKVLTLNTEHEGIENTLAFELPELAESVKLLVLDRYKELSQSVSTQAWHRFSLKTLHLLIPELMNATSEQNTLLEQFQLKSDVRKRYSEYKKLPTKDVLTEIYNPTVNKTVSQAFKVIDALLVKYGKEQIRYITIEMPRDDNEEDEKKRIKELHAKNSQRKNDSQSYFMQKSGWSQEKFQTTIQKNRRFLAKLLYYYEQDGICAYTGLSISPELLVSDSTEIDHIIPISISLDDSINNKVLVLSKANQVKGQQTPYDAWMDGSFKKINGKFSNWDDYQKWVESRHFSHKKENNLLETRNIFDSEQVEKFLARNLNDTRYASRLVLNTLQSFFANHETKVRVVNGSFTHTLRKKWGADLDKTRETHHHHAVDATLCAVTPFVKVSRYHYAVKEETGEKVMREIDFETGEIVDEMSYQEFKKSKKYERKTYQVKWPNFREQLKPVNLHPRIKFSHQVDRKANRKLSDATIYSVREKTEVKTLKSGKQKITTDEYTIGKIKDIYTVDGWEAFKKKQDKLLMKDLDEKTYERLLSIAETTPDFQEVEEKNGKVKRVKRSPFAVYCEENDIPAIQKYAKKNNGPLIRSLKYYDGKLNKHINITKDSQGRPVEKTKNGRKVTLQSLKPYRYDIYQDLETKAYYTVQLYYSDLRFVEGKYGITEKEYMKKVAEQTKGQVVRFCFSLQKNDGLEIEWKDSQRYDVRFYNFQSANSINFKGLEQEMMPAENQFKQKPYNNGAINLNIAKYGKEGKKLRKFNTDILGKKHYLYYEKEPKNIIK

SEQ ID NO: 943 - protein, 1150 aa, Enterococcus faecalis
MYSIGLDLGISSVGWSVIDERTGNVIDLGVRLFSAKNSEKNLERRTNRGGRRLIRRKTNRLKDAKKILAAVGFYEDKSLKNSCPYQLRVKGLTEPLSKGEIYKVTLHILKKRGISYLDEDDTEAAKESQDYKEQVRKNAQLLTKYTPGQIQLQRLKENNRVKTGINVQGNYQLNVFKVSAYANELATILKTQQAFYPNELTDDWIALFVQPGIAEEAGLIYRKRPYYHGPGNEANNSPYGRWSDFQKTGEPATNIFDKLIGKDFQGELRASGLSLSAQQYNLLNDLTNLKIDGEVPLSSEQKEYILTELMTKEFTRFGVNDVVKLLGVKKERLSGWRLDKKGKPEIHTLKGYRNWRKIFAEAGIDLATLPTETIDCLAKVLTLNTEREGIENTLAFELPELSESVKLLVLDRYKELSQSISTQSWHRFSLKTLHLLIPELMNATSEQNTLLEQFQLKSDVRKRYSEYKKLPTKDVLAEIYNPTVNKTVSQAFKVIDALLVKYGKEQIRYITIEMPRDDNEEDEKKRIKELHAKNSQRKNDSQSYFMQKSGWSQEKFQTTIQKNRRFLAKLLYYYEQDGICAYTGLPISPELLVSDSTEIDHIIPISISLDDSINNKVLVLSKANQVKGQQTPYDAWMDGSFKKINGKFSNWDDYQKWVESRHFSHKKENNLLETRNIFDSEQVEKFLARNLNDTRYASRLVLNTLQSFFTNQETKVRVVNGSFTHTLRKKWGADLDKTRETHHHHAVDATLCAVTPFVKVSRYHYAVKEETGEKVMREIDFETGEIVNEMSYREFKKSKKYERKTYQVKWPNFREQLKPVNLHPRIKFSHQVDRKANRKLSDATIYSVREKTEVKTLKSGKQKITTDEYTIGKIKDIYTLDGWEAFKKKQDKLLMKDLDEKTYERLLSIAETTPDFQEVEEKNGKVKRVKRSPFAVYCEENDIPAIQKYAKKNNGPLIRSLKYYDGKLNKHINITKDSQGRPVEKTKNGRKVTLQSLKPYRYDIYQDLETKAYYTVQLYYSDLRFVEGKYGITEKEYMKKVAEQTKGQVVRFCFSLQKNDGLEIEWKDSQRYDVRFYNFQSANSINFKGLEQEIMPAENQFKQKPYNNGAINLNIAKYGKEGKKLRKFNTDILGKKHYLFYEKEPKNIIK

SEQ ID NO: 944 - protein, 1150 aa, Enterococcus faecalis; identical to SEQ ID NO: 178

SEQ ID NO: 945 - protein, 1150 aa, Enterococcus faecalis; identical to SEQ ID NO: 179

SEQ ID NO: 946 - protein, 1340 aa, Enterococcus faecium
MKKEYTIGLDIGTNSVGWSVLTDDYRLVSKKMKVAGNTEKSSTKKNFWGVRLFDEGQTAEARRSKRTARRRLARRRQRILELQKIFAPEILKIDEHFFARLNESFLVLDEKKQSRHPVFATIKQEKSYHQTYPTIYHLRQALADSSEKADIRLVYLAMAHLLKYRGHFLIEGELNTENSSVTETFRQFLSTYNQQFSEADDKQTEKLDEAVDCSFVFTEKMSKTKKAETLLKYFPHEKSNGYLSQFIKLMVGNQGNFKNVFGLEEEAKLQFSKETYEEDLEELLEKIGDDYIDLFVQAKNVYDAVLLSEILSDSTKNTRAKLSAGMIRRYDAHKEDLVLLKRFVKENLPKKYRAFFGDNSVNGYAGYIEGHATQEDFYKFVKKELTGIRGSEVFLTKIEQENFLRKQRTFDNGVIPHQIHLTELRAIIANQKKHYPFLKEEQEKLESLLTFKIPYYVGPLAKKQENSPFAWLIRKSEEKIKPWNLPEIVDMEGSAVRFIERMNNTDMYIPHNKVLPKNSLLYQKFSIYNELTKVRYQDERGQMNYFSSIEKKEIFHELFEKNRKVTKKDLQEFLYLKYDIKHAELSGIEKAFNASYTTYHDFLTMSENKREMKQWLEDPELASMFEEIIKTLTVFEDREMIKTRLSHHEATLGKHIIKKLTKKHYTGWGRLSKELIQGIRDKQSNKTILDYLINDDDFPHHRNRNFMQLINDDSLSFKKEIKKAQMITDTENLEEIVKELTGSPAIKKGILQSLKIVDEIVGIMGYEPANIVVEMARENQTTGRGLKSSRPRLKALEESLKDFGSQLLKEYPTDNSSLQKDRLYLYYLQNGRDMYTGAPLDIHRLSDYDIDHIIPRSFTTDNSIDNKVLVSSKENRLKKDDVPSEKVVKKMRSFWYDLYSSKLISKRKLDNLTKIKLTEEDKAGFIKRQLVETRQITKHVAGILHHRFNKAEDTNEPIRKVRIITLKSALVSQFRNRFGIYKVREINEYHHAHDAYLNGVVALALLKKYPQLAPEFVYGEYLKFNAHKANKATVKKEFYSNIMKFFESDTPVCDENGEIFWDKSKSIAQVKKVINHHHMNIVKKTEIQKGGFSKETVEPKKDSSKLLPRKNNWDPAKYGGLGSPNVAYTVAFTYEKGKARKRTNALEGITIMEREAFEQSPVLFLKNKGYEQAEIEMKLPKYALFELENGRKRMVASNKEAQKANSFLLPEHLVTLLYHAKQYDEISHKESFDYVNEHHKEFSEVFARVLEFAGKYTLAEKNIEKLEKIYKENQTDDLAKLASSFVNLMQFNAMGAPADFKFFDVTIPRKRYTSLTEIWQSTIIHQSITGLYETRIRMGK

SEQ ID NO: 947 - protein, 1339 aa, Enterococcus faecium
MKKEYTIGLDIGTNSVGWSVLTDDYRLVSKKMKVAGNTEKSSTKKNFWGVRLFDEGQTAEARRSKRTARRRLARRRQRILELQKIFAPEILKIDEHFFARLNESFLVLDEKKQSRHPVFATIKQEKSYHQTYPTIYHLRQALADSSEKADIRLVYLAMAHLLKYRGHFLIEGELNTENSSVTETFRQFLSTYNQQFSEADDKQTEKLDEAVDCSFVFTEKMSKTKKAETLLKYFPHEKSNGYLSQFIKLMVGNQGNFKNVFGLEEAKLQFSKETYEEDLEELLEKIGDDYIDLFVQAKNVYDAVLLSEILSDSTKNTRAKLSAGMIRRYDAHKEDLVLLKRFVKENLPKKYRAFFGDNSVNGYAGYIEGHATQEDFYKFVKKELTGIRGSEVFLTKIEQENFLRKQRTFDNGVIPHQIHLTELRAIIANQKKHYPFLKEEQEKLESLLTFKIPYYVGPLAKKQENSPFAWLIRKSEEKIKPWNLPEIVDMEGSAVRFIERMINTDMYMPHNKVLPKNSLLYQKFSIYNELTKVRYQDERGQMNYFSSIEKKEIFHELFEKNRKVTKKDLQEFLYLKYDIKHAELSGIEKAFNASYTTYHDFLTMSENKREMKQWLEDPELASMFEEIIKTLTVFEDREMIKTRLSHHEATLGKHIIKKLTKKHYTGWGRLSKELIQGIRDKQSNKTILDYLINDDDFPHHRNRNFMQLINDDSLSFKKEIKKAQMITDTENLEEIVKELTGSPAIKKGILQSLKIVDEIVGIMGYEPANIVVEMARENQTTGRGLKSSRPRLKALEESLKDFGSQLLKEYPTDNSSLQKDRLYLYYLQNGRDMYTGAPLDIHRLSDYDIDHIIPRSFTTDNSIDNKVLVSSKENRLKKDDVPSEKVVKKMRSFWYDLYSSKLISKRKLDNLTKIKLTEEDKAGFIKRQLVETRQITKHVAGILHHRFNKAEDTNEPIRKVRIITLKSALVSQFRNRFGIYKVREINEYHHAHDAYLNGVVALALLKKYPQLAPEFVYGEYLKFNAHKANKATVKKEFYSNIMKFFESDTPVCDENGEIFWDKSKSIAQVKKVINHHHMNIVKKTEIQKGGFSKETVEPKKDSSKLLPRKNNWDPAKYGGLGSPNVAYTVAFTYEKGKARKRTNALEGITIMEREAFEQSPVLFLKNKGYEQAEIEMKLPKYALFELENGRKRMVASNKEAQKANSFLLPEHLVTLLYHAKQYDEISHKESFDYVNEHHKEFSEVFARVLEFAGKYTLAEKNIEKLEKIYKENQTDDLAKLASSFVNLMQFNAMGAPADFKFFDVTIPRKRYTSLTEIWQSTIIHQSITGLYETRIRMGK

SEQ ID NO: 948 - protein, 1340 aa, Enterococcus faecium
MKKEYTIGLDIGTNSVGWSVLTDDYRLVSKKMKVAGNTEKSSTKKNFWGVRLFDEGQTAEARRSKRTARRRLARRRQRILELQKIFAPEILKIDEHFFARLNESFLVLDEKKQSRHPVFATIKQEKSYHQTYPTIYHLRQALADSSEKADIRLVYLAMAHLLKYRGHFLIEGELNTENSSVTETFRQFLSTYNQQFSEADDKQTEKLDEAVDCSFVFTEKMSKTKKAETLLKYFPHEKSNGYLSQFIKLMVGNQGNFKNVFGLEEEAKLQFSKETYEEDLEELLEKIGDDYIDLFVQAKNVYDAVLLSEILSDSTKNTRAKLSAGMIRRYDAHKEDLVLLKRFVKENLPKKYRAFFGDNSVNGYAGYIEGHATQEDFYKFVKKELTGIRGSEVFLTKIEQENFLRKQRTFDNGVIPHQIHLTELRAIIANQKKHYPFLKEEQEKLESLLTFKIPYYVGPLAKKQENSPFAWLIRKSEEKIKPWNLPEIVDMEGSAVRFIERMINTDMYIPHNKVLPKNSLLYQKFSIYNELTKVRYQDERGQMNYFSSIEKKEIFHELFEKNRKVTKKDLQEFLYLKYDIKHAELSGIEKAFNASYTTYHDFLTMSENKREMKQWLEDPELASMFEEIIKTLTVFEDREMIKTRLSHHEATLGKHIIKKLTKKHYTGWGRLSKELIQGIRDKQSNKTILDYLINDDDFPHHRNRNFMQLINDDSLSFKKEIKKAQMITDTENLEEIVKELTGSPAIKKGILQSLKIVDEIVGIMGYEPANIVVEMARENQTTGRGLKSSRPRLKALEESLKDFGSQLLKEYPTDNSSLQKDRLYLYYLQNGRDMYTGAPLDIHRLSDYDIDHIIPRSFTTDNSIDNKVLVSSKENRLKKDDVPSEKVVKKMRSFWYDLYSSKLISKRKLDNLTKIKLTEEDKAGFIKRQLVETRQITKHVAGILHHRFNKAEDTNEPIRKVRIITLKSALVSQFRNRFGIYKVREINEYHHAHDAYLNGVVALALLKKYPQLAPEFVYGEYLKFNAHKANKATVKKEFYSNIMKFFESDTPVCDENGEIFWDKSKSIAQVKKVINHHHMNIVKKTEIQKGGFSKETVEPKKDSSKLLPRKNNWDPAKYGGLGSPNVAYTVAFTYEKGKARKRTNALEGITIMEREAFEQSPVLFLKNKGYEQAEIEMKLPKYALFELENGRKRMVASNKEAQKANSFLLPEHLVTLLYHAKQYDEISHKESFDYVNEHHKEFSEVFARVLEFAGKYTLAEKNIEKLEKIYKENQTDDLAKLASSFVNLMQFNAMGAPADFKFFDVTIPRKRYTSLTEIWQSTIIHQSITGLYETRIRMGK

SEQ ID NO: 949 - protein, 1340 aa, Enterococcus faecium
MKKEYTIGLDIGTNSVGWSVLTDDYRLVSKKMKVAGNTEKSSTKKNFWGVRLFDEGQTAEARRSKRTARRRLARRRQRILELQKIFAPEILKIDEHFFARLNESFLVLDEKKQSRHPVFATIKQEKSYHQTYPTIYHLRQALADSSEKADIRLVYLAMAHLLKYRGHFLIEGELNTENSSVTETFRQFLSTYNQQFSEADDKQTEKLDEAVDCSFVFTEKMSKTKKAETLLKYFPHEKSNGYLSQFIKLMVGNQGNFKNVFGLEEEAKLQFSKETYEEDLEELLEKIGDDYIDLFVQAKNVYDAVLLSEILSDSTKNTRAKLSAGMIRRYDAHKEDLVLLKRFVKENLPKKYRAFFGDNSVNGYAGYIEGHATQEDFYKFVKKELTGIRGSEVFLTKIEQENFLRKQRTFDNGVIPHQIHLTELRAIIANQKKHYPFLKEEQEKLESLLTFKIPYYVGPLAKKQENSPFAWLIRKSEEKIKPWNLPEIVDMEGSAVRFIERMINTDMYMPHNKVLPKNSLLYQKFSIYNELTKVRYQDERGQMNYFSSIEKKEIFHELFEKNRKVTKKDLQEFLYLKYDIKHAELSGIEKAFNASYTTYHDFLTMSENKREMKQWLEDPELASMFEEIIKTLTVFEDREMIKTRLSHHEATLGKHIIKKLTKKHYTGWGRLSKELIQGIRDKQSNKTILDYLINDDDFPHHRNRNFMQLINDDSLSFKKEIKKAQMITDTENLEEIVKELTGSPAIKKGILQSLKIVDEIVGIMGYEPANIVVEMARENQTTGRGLKSSRPRLKALEESLKDFGSQLLKEYPTDNSSLQKDRLYLYYLQNGRDMYTGAPLDIHRLSDYDIDHIIPRSFTTDNSIDNKVLVSSKENRLKKDDVPSEKVVKKMRSFWYDLYSSKLISKRKLDNLTKIKLTEEDKAGFIKRQLVETRQITKHVAGILHHRFNKAEDTNEPIRKVRIITLKSALVSQFRNRFGIYKVREINEYHHAHDAYLNGVVALALLKKYPQLAPEFVYGEYLKFNAHKANKATVKKEFYSNIMKFFESDTPVCDENGEIFWDKSKSIAQVKKVINHHHMNIVKKTEIQKGGFSKETVEPKKDSSKLLPRKNNWDPAKYGGLGSPNVAYTVAFTYEKGKARKRTNALEGITIMEREAFEQSPVLFLKNKGYEQAEIEMKLPKYALFELENGRKRMVASNKEAQKANSFLLPEHLVTLLYHAKQYDEISHKESFDYVNEHHKEFSEVFARVLEFAGKYTLAEKNIEKLEKIYKENQTDDLAKLASSFVNLMQFNAMGAPADFKFFDVTIPRKRYTSLTEIWQSTIIHQSITGLYETRIRMGK

SEQ ID NO: 950 - protein, 1339 aa, Enterococcus faecium
MKKEYTIGLDIGTNSVGWSVLTDDYRLVSKKMKVAGNTEKSSTKKNFWGVRLFDEGQTAEARRSKRTARRRLARRRQRILELQKIFAPEILKIDEHFFARLNESFLVLDEKKQSRHPVFATIKQEKSYHQTYPTIYHLRQALADSSEKADIRLVYLAMAHLLKYRGHFLIEGELNTENSSVTETFRQFLSTYNQQFSEADDKQTEKLDEAVDCSFVFTEKMSKTKKAETLLKYFPHEKSNGYLSQFIKLMVGNQGNFKNVFGLEEAKLQFSKETYEEDLEELLEKIGDDYIDLFVQAKNVYDAVLLSEILSDSTKNTRAKLSAGMIRRYDAHKEDLVLLKRFVKENLPKKYRAFFGDNSVNGYAGYIEGHATQEDFYKFVKKELTGIRGSEVFLTKIEQENFLRKQRTFDNGVIPHQIHLTELRAIIANQKKHYPFLKEEQEKLESLLTFKIPYYVGPLAKKQENSPFAWLIRKSEEKIKPWNLPEIVDMEGSAVRFIERMINTDMYIPHNKVLPKNSLLYQKFSIYNELTKVRYQDERGQMNYFSSIEKKEIFHELFEKNRKVTKKDLQEFLYLKYDIKHAELSGIEKAFNASYTTYHDFLTMSENKREMKQWLEDPELASMFEEIIKTLTVFEDREMIKTRLSHHEATLGKHIIKKLTKKHYTGWGRLSKELIQGIRDKQSNKTILDYLINDDDFPHHRNRNFMQLINDDSLSFKKEIKKAQMITDTENLEEIVKELTGSPAIKKGILQSLKIVDEIVGIMGYEPANIVVEMARENQTTGRGLKSSRPRLKALEESLKDFGSQLLKEYPTDNSSLQKDRLYLYYLQNGRDMYTGAPLDIHRLSDYDIDHIIPRSFTTDNSIDNKVLVSSKENRLKKDDVPSEKVVKKMRSFWYDLYSSKLISKRKLDNLTKIKLTEEDKAGFIKRQLVETRQITKHVAGILHHRFNKAEDTNEPIRKVRIITLKSALVSQFRNRFGIYKVREINEYHHAHDAYLNGVVALALLKKYPQLAPEFVYGEYLKFNAHKANKATVKKEFYSNIMKFFESDTPVCDENGEIFWDKSKSIAQVKKVINHHHMNIVKKTEIQKGGFSEETVEPKKDSSKLLPRKNNWDPAKYGGLGSPNVAYTVAFTYEKGKARKRTNALEGITIMEREAFEQSPVLFLKNKGYEQAEIEMKLPKYALFELENGRKRMVASNKEAQKANSFLLPEHLVTLLYHAKQYDEISHKESFDYVNEHHKEFSEVFARVLEFAGKYTLAEKNIEKLEKIYKENQTDDLAKLASSFVNLMQFNAMGAPADFKFFDVTIPRKRYTSLTEIWQSTIIHQSITGLYETRIRMGK

SEQ ID NO: 951 - protein, 1340 aa, Enterococcus faecium
MKKEYTIGLDIGTNSVGWSVLTDDYRLVSKKMKVAGNTEKSSTKKNFWGVRLFDEGQTAEARRSKRTARRRLARRRQRILELQKIFAPEILKIDEHFFARLNESFLVLDEKKQSRHPVFATIKQEKSYHQTYPTIYHLRQALADSSEKADIRLVYLAMAHLLKYRGHFLIEGELNTENSSVTETFRQFLSTYNQQFSEADDKQTEKLDEAVDCSFVFTEKMSKTKKAETLLKYFPHEKSNGYLSQFIKLMVGNQGNFKNVFGLEEEAKLQFSKETYEEDLEELLEKIGDDYIDLFVQAKNVYDAVLLSEILSDSTKNTRAKLSAGMIRRYDAHKEDLVLLKRFVKENLPKKYRAFFGDNSVNGYAGYIEGHATQEDFYKFVKKELTGIRGSEVFLTKIEQENFLRKQRTFDNGVIPHQIHLTELRAIIANQKKHYPFLKEEQEKLESLLTFKIPYYVGPLAKKQENSPFAWLIRKSEEKIKPWNLPEIVDMEGSAVRFIERMINTDMYIPHNKVLPKNSLLYQKFSIYNELTKVRYQDERGQMNYFSSIEKKEIFHELFEKNRKVTKKDLQEFLYLKYDIKHAELSGIEKAFNASYTTYHDFLTMSENKREMKQWLEDPELASMFEEIIKTLTVFEDREMIKTRLSHHEATLGKHIIKKLTKKHYTGWGRLSKELIQGIRDKQSNKTILDYLINDDDFPHHRNRNCMQLINDDSLSFKKEIKKAQMITDTENLEEIVKELTGSPAIKKGILQSLKIVDEIVGIMGYEPANIVVEMARENQTTGRGLKSSRPRLKALEESLKDFGSQLLKEYPTDNSSLQKDRLYLYYLQNGRDMYTGAPLDIHRLSDYDIDHIIPRSFTTDNSIDNKVLVSSKENRLKKDDVPSEKVVKKMRSFWYDLYSSKLISKRKLDNLTKIKLTEEDKAGFIKRQLVETRQITKHVAGILHHRFNKAEDTNEPIRKVRIITLKSALVSQFRNRFGIYKVREINEYHHAHDAYLNGVVALALLKKYPQLAPEFVYGEYLKFNAHKANKATVKKEFYSNIMKFFESDTPVCDENGEIFWDKSKSIAQVKKVINHHHMNIVKKTEIQKGGFSKETVEPKKDSSKLLPRKNNWDPTKYGGLGSPNVAYTVAFTYEKGKARKRTNALEGITIMEREAFEQSPVLFLKNKGYEQAEIEMKLPKYALFELENGRKRMVASNKEAQKANSFLLPEHLVTLLYHAKQYDEISHKESFDYVNEHHKEFSEVFARVLEFAGKYTLAEKNIEKLEKIYKENQTDDLAKLASSFVNLMQFNAMGAPADFKFFDVTIPRKRYTSLTEIWQSTIIHQSITGLYETRIRMGK

SEQ ID NO: 952 - protein, 892 aa, Enterococcus faecium
MTFKIPYYVGPLAKKQENSPFAWLIRKSEEKIKPWNLPEIVDMEGSAVRFIERMINTDMYMPHNKVLPKNSLLYQKFSIYNELTKVRYQDERGQMNYFSSIEKKEIFHELFEKNRKVTKKDLQEFLYLKYDIKHAELSGIEKAFNASYTTYHDFLTMSENKREMEQWLEDPELASMFEEIIKTLTVFEDREMIKTRLSHHKATLGKHIIKKLTKKHYTGWGRLSKELIQGIRDKQSNKTILDYLINDDDFPHHRNRNFMQLINDDSLSFKKEIKKAQMITDTENLEEIVKELTGSPAIKKGILQSLKIVDEIVGIMGYEPANIVVEMARENQTTGRGLKSSRPRLKALEESLKDFGSQLLKEYPTDNSSLQKDRLYLYYLQNGRDMYTGAPLDIHRLSDYDIDHIIPRSFTTDNSIDNKVLVSSKENRLKKDDVPSEKVVKKMRSFWYDLYSSKLISKRKLDNLTKIKLTEEDKAGFIKRQLVETRQITKHVAGILHHRFNKAEDTNEPIRKVRIITLKSALVSQFRNRFGIYKVREINEYHHAHDAYLNGVIALALLKKYPQLAPEFVYGEYLKFNAHKANKATVKKEFYSNIMKFFESDTPVCDENGEIFWDKSKSIAQVKKVINHHHMNIVKKTEIQKGGFSKETVEPKKDSSKLLPRKNNWDPAKYGGLGSPNVAYTVAFTYEKGKARKRTNALEGITIMEREAFEQSPVLFLKNKGYEQAEIEMKLPKYALFELENGRKRMVASNKEAQKANSFLLPEHLVTLLYHAKQYDEISHKESFDYVNEHHKEFSEVFARVLEFAGKYTLAEKNIEKLEKIYKENQTDDLAKLASSFVNLMQFNAMGAPADFKFFDVTIPRKRYTSLTEIWQSTIIHQSITGLYETRIRMGK

SEQ ID NO: 953 - protein, 1336 aa, Enterococcus hirae
MTKDYTIGLDIGTNSVGWAVLTDDYQLMKRKMSVHGNTEKKKIKKNFWGARLFDEGQTAEFRRTKRTNRRRLARRKYRLSKLQDLFAEELCKQDDCFFVRLEESFLVPEEKQYKPASIFPTLEEEKEYYQKYPTIYHLRQKLVDSTEKEDLRLVYLALAHLLKYRGHFLFEGDLDTENTSIEESFRVFLEQYSKQSDQPLIVHQPVLTILTDKLSKTKKVEEILKYYPTEKINSFFAQCLKLIVGNQANFKRIFDLEAEVKLQFSKETYEEDLESLLEKIGDEYLDIFLQAKKVHDAILLSEIISSTVKHTKAKLSSGMVERYERHKADLAKFKQFVKENVPQKATVFFKDTTKNGYAGYIKGKTTQEEFYKFVKKELSGVVGSEPFLEKIDQETFLLKQRTYTNGVIPHQVHLIELKAIIDQQKQHYPFLEEAGPKIIALFKFRIPYYVGPLAKEQEASSFAWIERKTAEKINPWNFSEVVDIEKSAMRFIQRMTKQDTYLPTEKVLPKNSLLYQKYMIFNELTKVSYKDERGVKQYFSGDEKQQIFKQLFQKERGKITVKKLQNFLYTHYHIENAQIFGIEKAFNASYSTYHDFMKLAKTNQKAMQEWLEQPEMEPIFEDIVKILTIFEDRQMIKHQLSKYQEVFGEKLLKEFARKHYTGWGRFSAKLIHGIRDRKTNKTILDYLINDDDVPANRNRNLMQLINDEHLSFKEEIAKATVFSKHKSLVDVIQDLPGSPAIKKGIWQSLKIVEELIAIIGYKPKNIVIEMARENQKTHRTSPRLKALENGLKQIGSTLLKEQPTDNKALQKERLYLYYLQNGRDMYTGEPLEIENLHQYEVDHIIPRSFIVDNSIDNKVLVASKQNQKKRDDVPKKQIVNEQRIFWNQLKEAKLISPKKYAYLTKIELTPEDKARFIQRQLVETRQITKHVANILHQSFNQEEEGTDCDGVQIITLKATLTSQFRQTFGLYKVREINPHHHAHDAYLNGFIANVLLKRYPKLAPEFVYGKYVKYSLARENKATAKKEFYSNILKFLESDEPFCDENGEIYWEKSHHLPRIKKVLSSHQVNVVKKVEQQKGGFYKETVNSKEKPDKLIERKNNWDVTKYGGFGSPVIAYAIAFVYAKGKTQKKTRAIEGITIMEQAAFEKDPTTFLKEKGFPQVTEFIKLPKYTLFEFDNGRRRFLASHKESQKGNPFILSDQLVTLLYHAQHYDKITYQESFDYVNTHLSDFSAILTEVLAFAEKYTLADKNIERIQELYEENKYGETSMIAQSFLQLLQFNAIGAPADFKFFGVTIPRKRYTSLTEIWDATIIYQSVTGLYETRIRMGDLWAGEQ

SEQ ID NO: 954 - protein, 116 aa, Enterococcus sp.
MYSIGLDLGISSVGWSVIDERTGNVIDLGVRLFSAKNSEKNLERRTNRGGRRLIRRKTNRLKDAKKILAAVGFYEDKSLKNSCPYQLRVKGLTELLSKGEIYKVTLHILKNVELVT

SEQ ID NO: 955 - protein, 1391 aa, Eubacterium sp.
MENKQYYIGLDVGTNSVGWAVTDTSYNLLRAKGKDMWGARLFDEAKTAVERRTKRTSRRRSEREKARKAMLKELFADEINKVDPNFFIRLEESKFFLDDRSENNRQRYTLFNDAKFTDKDYYEKYKTIFHLRSALINSDEKFDVRLVFLAILNLFSHRGHFLNASLKGDGEIQGVDIFYNDLYEVCEEFEIDLPQISNIDNFEKILSQKGKSRTKILEELSEELSISKKEKIKYSLLKLICGMKIKVVDIYADEDIQEDDKKKDLGFRESDYEKSSLEVKEIIGDDHFELIERAKAVHDIGLLANIIGNSKYLCEARVEAYDNHHKDLQKIKELLKKYDIKAYTDMFRKMTDKNYSAYVGSVNSNIAKERRSVDNRKIEDLYEYIKKIALKNISDDNEDKIEILKKIETGEFLKKQLTASNGVIPNQLQSRELRAILKKAENYLPFLKEKGEKNLTVSEMIIQLFEFQIPYYVGPLDKNPKKDKNANSWAVIPSGGRILPWNFEDKVDVKGSRKEFIEKMVRKCTYLSEEHTLPKQSLLYEKFMVLNEINNIKIDGEKISVEAKQKIYNDLFMKGKKVSQKAIKQELISLNIMSKDSVLSGIDTVCNAYLSSIAKFRGVFDENVNNQSTIDMIEDIIFLKTVYSDEKRFVKEEIVEKYGDEIDKDKIKRILGFKFSNWGNISKSFLELEGADVGTGEIRSIIQSLWETNFNLMELLSSRFTYMDELEKRVKKLEKPLSEWTIEDLDDMYLSSPVKRMIWQSMKIVDEIQTVIGYAPKRIFVEMTRSEGEKVRTKSRKDRLKELYSAIKEDSKQWVKELDAKDESYFRSKKMYLYYLQKGRCMYSGEVIELDKLMDDNLYDIDHIYPRSFVKDDSLDNLVLVKKEINNRKQNDPITPQIQASCQGFWKVLHEQGFISNEKYSRLTRKTQEFSDEEKLSFINRQIVETGQATKCMAQILQKSMGEDVDVVFSKARLVSEFRHKFELFKSRLINDFHHANDAYLNIVVGNSYFVKFTRNPANFIKDARKNPDNPAYKYHMDRFFERDVKSKSEVAWIGQSEGNAGTIAIVKKTMSKNSPLITKKVEEGHGSITKETIVGVKEIKFGRNKVEKADKTPKKANLQAYRPIKTSDERLCNILRYGGRTSISISGYCLVEYVKKRKTIRSLEAIPVYLGRKDSLSEEKLLNYFRYNLNDGGKDSVSDIRLCLPFISTNSLVKIDGYLYYLGGKNDDRIQLYNAYQLKMKKEEVEYIRKIEKAVSMSKFDEIDREKNPVLTEEKNIELYNKIQDKFENTVFSKRMSLVKYNKKDLSFGDFLKNKKSKFEEIDLEKQCKVLYNIIFNLSNLKEVDLSDIGGSKSTGKCRCKKNITNYKEFKLIQQSITGLYSCEKDLMTI

SEQ ID NO: 956 - protein, 1391 aa, Eubacterium yurii
MENKQYYIGLDVGTNSVGWAVTDTSYNLLRAKGKDMWGARLFEKANTAAERRTKRTSRRRSEREKARKAMLKELFADEINRVDPSFFIRLEESKFFLDDRSENNRQRYTLFNDATFTDKDYYEKYKTIFHLRSALINSDEKFDVRLVFLAILNLFSHRGHFLNASLKGDGDIQGMDVFYNDLVESCEYFEIELPRITNIDNFEKILSQKGKSRTKILEELSEELSISKKDKSKYNLIKLISGLEASVVELYNIEDIQDENKKIKIGFRESDYEESSLKVKEIIGDEYFDLVERAKSVHDMGLLSNIIGNSKYLCEARVEAYENHHKDLLKIKELLKKYDKKAYNDMFRKMTDKNYSAYVGSVNSNIAKERRSVDKRKIEDLYKYIEDTALKNIPDDNKDKIEILEKIKLGEFLKKQLTASNGVIPNQLQSRELRAILKKAENYLPFLKEKGEKNLTVSEMIIQLFEFQIPYYVGPLDKNPKKDNKANSWAKIKQGGRILPWNFEDKVDVKGSRKEFIEKMVRKCTYISDEHTLPKQSLLYEKFMVLNEINNIKIDGEKISVEAKQKIYNDLFVKGKKVSQKDIKKELISLNIMDKDSVLSGTDTVCNAYLSSIGKFTGVFKEEINKQSIVDMIEDIIFLKTVYGDEKRFVKEEIVEKYGDEIDKDKIKRILGFKFSNWGNLSKSFLELEGADVGTGEVRSIIQSLWETNFNLMELLSSRFTYMDELEKRVKKLEKPLSEWTIEDLDDMYLSSPVKRMIWQSMKIVDEIQTVIGYAPKRIFVEMTRSEGEKVRTKSRKDRLKELYNGIKEDSKQWVKELDSKDESYFRSKKMYLYYLQKGRCMYSGEVIELDKLMDDNLYDIDHIYPRSFVKDDSLDNLVLVKKEINNRKQNDPITPQIQASCQGFWKILHDQGFMSNEKYSRLTRKTQEFSDEEKLSFINRQIVETGQATKCMAQILQKSMGEDVDVVFSKARLVSEFRHKFELFKSRLINDFHHANDAYLNIVVGNSYFVKFTRNPANFIKDARKNPDNPVYKYHMDRFFERDVKSKSEVAWIGQSEGNSGTIVIVKKTMAKNSPLITKKVEEGHGSITKETIVGVKEIKFGRNKVEKADKTPKKPNLQAYRPIKTSDERLCNILRYGGRTSISISGYCLVEYVKKRKTIRSLEAIPVYLGRKDSLSEEKLLNYFRYNLNDGGKDSVSDIRLCLPFISTNSLVKIDGYLYYLGGKNDDRIQLYNAYQLKMKKEEVEYIRKIEKAVSMSKFDEIDREKNPVLTEEKNIELYNKIQDKFENTVFSKRMSLVKYNKKDLSFGDFLKNKKSKFEEIDLEKQCKVLYNIIFNLSNLKEVDLSDIGGSKSTGKCRCKKNITNYKEFKLIQQSITGLYSCEKDLMTI

SEQ ID NO: 957 - protein, 1142 aa, Facklamia hominis
MYSVGLDIGIASCGYSIINDVNGNIVELGTLLFKSRNSDNNEERRTNRGSRRLINRRRTRLDDGKKLLAEKGFKQDSKLKHVCPYELRVKGLHEKLTQGEIYKVVLHILKKRGISYLDESDENSSGIDGASYKDQVNLNLNLQKELTPGQIQLKRLKENGRIKSGVTFENGYQLNVFSVSAYANELNKILTKQSEYYSEIDQIWIDRFTKNGYRKEAGLVYRKRPYYDGPGNEKNNSIYGRWANFKEDGHPKENIFDQLIGLDSVDSTQVRASASTLTAQKYNLLNDLNNLTIIEDDRKFTTDEKVSIINYLMTQDITRFGPKELAKFYQLEVDQIRGWRIDNKGNPEIHSLKVYRDWKKIFNTSSIDLTSIQTWVVDELANVITLNTEIPSTLATLKIKIPDIDQQILNFVENNFYELKKKTSKNSWHSFSLKTLNILIPELLNTSEEQNTILERLNLKFDLKNKYAEKNQIPVKELLEQIYNPTVTKSVHQSIKLFNEIIEKYGKNNISYVTIEMPRDKNDQDQKDTIKRINKLNSERKNDSEKYFLERSGWDTIRFESALKKPRFAEKLLFYYEQKGKCAYSGQDILAESLLNESCEVDHIIPLSISFDDSIHNKVLVTASSNQEKGQRTPYMAFIDGAKLGQSWDDFVAWVNSCGFHRKKVQNLLYEENIFNPDVQRGFVSRNLNDTRYASRIVLNAIQSFFYKQKDLTKVKVVNGSFTHTLRKKWGSSLDKNRDTYHHHAVDATLCAVTPFINIVKYEFFEEDGIKYMVDLTTGEKVAYSDYKKMKFYDKRAYVPIWDGFIKQLTPANLYPKIKFSHQVDSKWNRKISDATIYSTRKIVETKINKKGVAKETVKDIVIDKIKDIYTPEGWRKFKEKQDKLLMKNFDEKTYNKLIKIAKEYPEKKEVQTSNGKVSLVEVSPFKMYCEEQNVPAIRKYSKKGNGPYIRSLKFYDKELGKHINITKDSYGNDIERTIRNKKIILKNQNSWRTDVYYNSVNNCYELLGIKYCHLKFYRGKYGIPKSIYDELKKEDEISSESVFKFSLYRHDRVRFEKDGEYIEALFGSKNESNKNYLELSPIDKNKWLSKENVKFFGEVAASGRFIKGLKPGIKVIKQSTDYMGHVYAIHQEKLKFVLSDA

SEQ ID NO: 958 - protein, 1347 aa, Finegoldia magna
MKSEKKYYIGLDVGTNSVGWAVTDEFYNILRAKGKDLWGVRLFEKAKTAADTRTFRSGRRRNDRKGMRLQILREIFEDEIKKVDKDFYDRLDESKFWAEDKKVSGKYSLFNDKNFSDKQYFEKFPTIFHLRKYLMEEHGKVDIRYYFLAINQMMKRRGHFLIDGQISHVTDDKPLKEQLILLINDLLKIELEEELMDSIFEILADVNEKRTDKKNNLKELIKGQDFNKQEGNILNSIFESIVTGKAKIKNIISDEDILEKIKEDNKEDFVLTGDSYEENLQYFEEVLQENITLFNTLKSTYDFVILQSILKGKSTLSDAQVERYDEHKKDLEILKKVIKKYDEDGKLFKQVFKEDNGNGYVSYIGYYLNKNKKITAKKKISNIEFTKYVKGILEKQCDCEDEAVKYLLGKIEQENFLLKQISSINSVIPHQIHLFELDKILENLAKNYPSFNNKKEEFTKIEKIRKTFTFRIPYYVGPLNDYHKNNGGNAWIFRNKGEKIRPWNFEKIVDLHKSEEEFIKRMLNQCTYLPEETVLPKSSILYSEYMVLNELNNLRIKGKPLDTDVKLKLIEELFKKKTKVTLKSIRDYMIRNNFADKEDFDNSEKNLEIVSNMKSYIDFNNILGDKFELEMVEDLIEKITIHTGNKTLLKKYIEETYPDLSSSQIQKIINLKYKDWGRLSRKLLDGIKGRNKTDDVNTVINFMRNSSDNLMQIIEGKNYSFNEYIDNLRKKYIPQEISYEVVENLYVSPSVKKMIWQVIRVTEEITKVMGYDPDKIFIEMAKSEEEKKTTISRKNKLLDLYKAIKKDERDSQYEKLLTGLNKLDESELRSKKLYLYYTQMGRDMYTGEKIDLDKLFDSTHYDKDHIIPQSMKKDDSIINNLVLVNKNANQTTKGNIYPVPSSIRNNPDIYNYWKYLMEKEFISKEKYNRLIRNTPLTNEELGVFINRQLVETRQSTKAIKELFEKFYQKSKIIPVKASLASDLRKDMNTLKSREVNDLHHAHDAFLNIVAGDVWNREFTSNPINYVNENREGDKVKYSLSKYFTRPRKSKGKVIWTPEKGRKLIVDTLNKPSVLISNESHVKKGELFNATISGKKDYKKGKIYLPLKKDDRLKDVSKYGGYKAINGAFFFLVEHTKSKKRIRSIELFPLHLLSKFYEDKNTVLDYAINVLQLQDPKIIIDKINYRTEIIIDNFSYLISTKSNDGSITVKPNEQMYWRVDEISNLKKIENKYKKDAILTEEDRKIMESYIDKIYQQFKAGKYKNRRTTDTIIEKYEIIDLDTLDNKQLYQLLVAFISLSYKTSNNAVDFTVIGLGTECGKPRITNLPDNTYLVYKSITGIYEKRIRIK

SEQ ID NO: 959 - protein, 1348 aa, Finegoldia magna; identical to SEQ ID NO: 222

SEQ ID NO: 960 - protein, 1516 aa, Flavobacteriaceae bacterium
MLKQQKDKIIGMNKKILGLDLGTNSIGWALVKQDLENKYGEIIGCGSRIIPMSQDVLGKFDAGISISQTAERTNYRSVRKLIQRNTLRRERLHRVLHQLDFLPKHYNDSIDFEKKLGQFKTDKETKLNYFVNQHGKHEFLFKDSFNEMVKEFKEEQPELFYIKNNGKETKIPYDWTIYYLRKKALSKKISKEELSWLVLNFNQKRGYYQLRGEIDEEKEKNKRYEKLYVSEVVKTNNTIKKTGEYLYDIYFDNGWKYEKQTTKPQDWLHKHKEFIITTTTLKNGETKRTFKTVDSEKDWIAIKSKTEQDIKESNKTVGAFIYDTLLKNPTQKIRGSLVKTIERKFYREEFEKILKEQIKHRPEINVNTAIGKENYTKCVTELYPRNEAHANNILTNDFNYLFTKDILFYQRPLKSKKSEIANCQYEYRTYIKKKEKTGKEERVKQPLKATPKSHPLFQEFRLWQFIHNLKIYIRETTVGNKPLFDVDITDTFFTSENDWATLFEYLNNKKEIEQKHVLEYLVSKKIISKSEKTDYRWNYVEDKKYPGNETRVDFINRLKKVENLNVDEFLTSELEFKLWHIIYSVTDKNEYEKALENFAIRQNIDKDSFVNSFKKFPPFKSDYGAYSTKAIKKLLPLMRLGKFWDGSEIPKVVVEKITDIKTRLTSVNYDESLFKKDEKKILETIVDDITPKQLLKSFVKLKGKNHLAGLNTYQACYLVYERHSESSDITQWENPDDIDSFLNHFKQHSLRNPIVEQVVTETLRTVRDIWKYYGNGSPNYFNEIHIELGREMKNPADKRKQMSAKINENENTNQRIKGILQELMNDGVQDIKPYSPSQQEILKIYEEGISQNPNVDYSKVSEDEITKIKKSNNPTLKEIQRYKLWLEQKYISPYTGKPIPLSELFTPAYQIEHIIPQSRYFDNSLSNKIICESEVNEDKSNKTAYEYLKTNGGSIVHGHHLLSLKEYEDHCQHYFKKNRTKLKNLLSEEIPEGFINRQLNDSRYISKLIKGLLSNIVREENEQEATSKNIVPVTGSITSKLKQDWGLNDKWNEIIAPRFKRLNKMTNSNDFGYFDEKINTFRIQVPDAISRGFNKKRIDHRHHTLDALVIACCTKKHIQYLNSLNNEIIKHELKPSILIKNAQGDYTKHFMLPWNNFPIDCKNAIENTIVSFKQNLRVINKTSNKYQSYKDENGNLRLGKDGKPKKGLTKQTKGNNWAVRKAMHEDTFYGEIVDGENKGKLKIKTLLDTSFDVKKIEDKVLDKSIRTILINYLKQDKYKNLSKPHEEAFSPNGIIEMNKNIISLNNNIPHKPIKRVTLKHEKGKKFSIKTLLDKKTKFAKSATGTNVFFCIYKNINGKIKYHTPSFEEIIEIQKQEFEIKYKSKLNVPETLFDKKESFELLFYLQPNDLVYLPNDEELKNRQLIDFNNLNKKQIKRIYKFTDGSGTTANFIPYQVAKVIFNLNKKEQAKSSFKYPIQNEFGVGSPQSKNQKSIEGILIKERCIKLKIDRLGNISKA

SEQ ID NO: 961 - protein, 1629 aa, Francisella cf.
MNFKILPIAIDLGVKNTGVFSAFYQKGTSLERLDNKNGKVYELSKDSYTLLMNNRTARRHQRRGIDRKQLVKRLFKLIWTEQLNLEWDKDTQQAISFLFNRRGFSFITDGYSPEYLNIVPEQVKAILMDIFDDYNGEDDLDSYLKLATEQESKISEIYNKLMQKILEFKLRKLCTDIKDDKVSTKTLKEITSYEFELLADYLANYSEILKTQKFSYTDKQGNLKELSYYHHDKYNIQEFLKRHATINIQILDTLLTDDLDIWNFNFEKFDFDKNEEKLQNQEDKDHIQAHLHHFVFAVNKIKSEMASGGRHRSQYFQEITNVLDENNHQEGYLKNFCENLHNKKYSNLSVKNLVNLIGNLSNLELKPLRKYFNDKIHAKADHWDEQKFTETYCHWILGEWRVGVKDQDKKDGAKYSYKDLCNELKQKVTKAGLVDFLLELDPCRTIPPYLDNNNRKPPKCQSLILNPKFLDNQYPNWQQYLQELKKLQSIQNYLESFETDLKVLKSSKDQPYFVEYRSSNQQIASGQRDYKDLDARILQFIFDRVKASDELLLNEIYFQAKKLKQKASSELEKLESSKKLDEVIANSQLSQILKSQHTNGIFEQGTFLHLVCKYYKQRQRARDSRLYIMPEYRYDKKLHKYNNTGRFDDDNQLLTYCNHKPRQKRYQLLNDLAGVLQVSPNFLKDKIGSDDDLFISKWLVEHIRGFKKACEDSLKIQKDNRGLLNHKINIARNTKGKCEKEIFNLICKIEGSEDKKGNYKHGLAYELGVLLFGEPNEASKPEFDRKIKKFNSIYSFAQIQQIAFAERKGNANTCAVCSADNAHRMQQIKITEPVEDNKDKIILSAKAQRLPAITTRIVDGAVKKMATILAKNIVDDNWQNIKQVLSAKHQLHIPIITESNAFEFEPALADVKGKSLKDRRKKALERISPENIFKDKNNRIKEFAKGISAYSGANLTDGDFDGAKEELDHIIPRSHKKYGTLNDEANLICVTRGDNKNKGNRIFCLRDLANNYKLKQFETTDDLEIEKKIADTIWDANKKDFKFGNYRSFINLTPQEQKAFRHALFLADENPIKQAVIRAINNRNRTFVNGTQRYFAEVLANNIYLRAKKENLNTDKISFDYFGIPTIGNGRGIAEIRQLYEKVDSDIQAYAKGDKPQASYSHLIDAMLAFCIAADEHRNDGSIGLEIDKNYSLYPLDKNTGEVFTKDIFSQIKITDNEFSDKKLVRKKATEGFNTHRQMTRDGIYAENYLPILIHKELDEVRKGYTWKNSEEIKIFKGKKYDIQQLNNLLYCLKFVDKPISIDIQISTLEELRNILTTNNIAATAEYYYINLKTQKLHEYYIENYNTALGYKKYTKEMEFLRSLAYRSERVKIKSIDDVKQVLDKDSNFIIGKITLPFKKEWQRLYREWQNITIKDDYEFLKSFFNVKSITKLHKKVRKDFSLPISTNEGKFLVKRKTWDNNFIYQILNDSDSRVDGTKPFIPAFDISKNEIVEAIIDSFTSKNIFWLPKNIELQKVDNKNIFAIDTSKWFEVETPSDLRDIGVATIQYKIDNNSRPKVRVKLDYVIDDDSKINYFTNHSLLKSRYPDKVLEILKQSTIIEFESSGFNKTIKEMLGMTLAGIYNETSNN

SEQ ID NO: 962 - protein, 1646 aa, Francisella cf.
MNIKILPIAIDLGAKNTGVFSAFYQKGTSLESLDNKNGKVYELSKDSYTLLMNNRTARRHQRRGIDRKQLVKRLFKLIWTKQLNLEWNKDTQQTISFLLNRRGFSFITDGYSPEYLNIAPEAVKAILMSILDDYNGEDDLDSYLQSATENDSKIDELYNKLLQKALEFKLRKLCIDIKEDKVTTKTLKELSNTEFKLLANYLVDYDRILRTQKFSYTDKQGNLRELNYYHHDKYNIQEFLKRNIIINDVILEKLTDDLDIWNLNFDKFDFEKNLEKLENQEDKDYLQTHLHHFVFAVNKIKSEMASGGRHRSQYFQEITNVLVENNHQEGYLKNFCENLHNKKYSNLSVKNLVNLIGNLSNLELKPLRKYFNDKIHAKADYWDEQKFAETYSDWILGEWRVGAKDKDKKDGAKYSYKNLCDELKQKVGINQDGIINQTKSDFVDFLLELDPCRTIPPYLDNNNRKPPKCQSLILNPKFLDNKYPNWQQYLQELKKLQTVQNYLGNFEIDLKDLKSSKEQPYFVKYKSLNQQIASGQRDYKDLDARVLQFIFDRVKASDELLLNEIYSHAKKLKQNTSSELEKLELCKKLDEVIANSQLSQILKSQHVNGIFEQGTFLHLVCKYYKQRQRARDSRLYIMPEYRYDKKLDKYNNTGRFDDDNQLLTYCNHKPRQKRYQLLNDLAGVLQVSPNFLKDKIGSDDDLFISKWLVEHIRGFKKACEDSLKIQKDNRGLLNHKINIARNTKGKCEKEIFNLICKIEGSEDKKGNYKHGLAYELGVLLFGEPNQASKLEFDRKIKKFNSIYSFAQIQQIAFAERKGNANTCAVCSADNAHRMQQIKVAKPVEGNKDNIILSAKAQRLPAIPTRIVDGAVKKIATILARNIVDDNWDNIKQALSNNQQLHVPIITESNAFEFEPALADIKGKSLKDKRKKALERIDPENVFKDKNNRIKEFAKGISAYSDANLANGDFDGAKEELDHIIPRSHKKYGTLNDEANLICVTREDNQNRGNKAVFLYDLKPNYKLKQFNTTDDLEIEKKIADTIWDASKQDFKFGNYRSFINLTPQEQIAFRHALFLADKNPIKKAVIRAIDNRNRTFVNGTQRYFAEVLANNIYLRAKKENLATNRITFDYFGIETTNSNGRGIADVRKLYEKVDSDIQAYAKGDKPQDSYSHLIDAMIAFCVAADEHKNEGSIGLKMGNQYGLFPTPDKYDENTGEIISWHNDDIFRKIKVSDNQFSDKKLVRKKATEGFNTHRQMTRDGIYGESYLPILIHKNLNEVRKGYNWENSEEIKIFKGKKYDIQQLNNLVYCLKFVDKPISIDIQITTLEELRNILETNNISTTAEYYYINLKTQKLHEYYIENYNTALGYKKYTKEMEFLRSLAYRTERVKIKSIDDVSMILAKDSNFKAGKIELPFKTEWQRLYLEWQNTTIKDNHEFLKSYFSVKNATKQHKKVRKDFSLPISTNEGKLLVKRKTWDNNFIYQILNDSDSRADGTKPFIPAFDISKNEIVETIIKSFTSKNIFWLPKNIELQKVDNKSIFAIDTSRWFEVETPKDLIEIGVSTIQYKIDNNSRPKVRVKLDYVMDDDSKINYFMNHSLLKSRYPDKVLEILKQSTIIEFESSGFNKTIKEMLGMTLAGIYNETSNN

SEQ ID NO: 963 - protein, 1629 aa, Francisella novicida
MNFKILPIAIDLGVKNTGVFSAFYQKGTSLERLDNKNGKVYELSKDSYTLLMNNRTARRHQRRGIDRKQLVKKLFKLIWTEQLNLEWDKDTQQAISFLFNRRGFSFITDGYSPEYLNIVPEQVKAILMDIFDDYNGEDDLDSYLKLATEQESKISEIYNKLMQKILEFKLRKLCTDIKDDKVSTKTLKEITSYEFELLADYLANYSESLKTQKFSYTDKQGNLKELSYYHHDKYNIQEFLKRHATINDEILDTLLTDDLDIWNFNFEKFDFDKNEEKLQNQEDKDHTQAHLHHFVFAVNKIKSEMASGGRHRGQYFQEITNVLDENNHQEGYLKNFCENLHNKKYSNLSVKNLVNLIGNLSNLELKPLRKYFNDKIHAKADHWDEQKFTETYCHWILGEWRVGLKDQDKKEGAKYSYKDLCNELKQKVTNAGLIDFLLELDPCRTIPPYLDNNNRKPPKCQSLILNPKFLDNQYPNWQQYLQELKKLQIIQDYLESFETDLKVLKSSKDQPYFVEYKSSNQQIASGQRDYKDLDARILQFIFDRVKASDELLLNEIYFQAKKLKQKASSELEKLESSKKLDEVIANSQLSKILKSQHTNGIFEQGTFLHLVCKYYKQRQRARDSRLYIMPEYRYDKKLDKYNNTGRFDDDNQLLTYCNHKPRQKRYQLLNDLAGVLQVSPNFLKDKIGSDDDLFISKWLVEHIRGFKKACEDSLKIQKDNRGLLNHKINIARNTKGKCEKEIFNLICKIEGSEDKKGNYKHGLAYELGVLLFGEPNEASKPEFDRKIKKFNSIYSFAQIQQIAFAERKGNANTCAVCSADNAHRMQQIKITEPVEDNKDKIILSAKAQRLPAIPTRIVDGAVKKMATILAKNIVDDNWQNIKQVLSAKHQLHIPIITESNAFEFEPALADVKGKSLKDRRKKALERISPENIFKDKNNRIKEFAKGISAYSGANLTDGDFDGAKEELDHIIPRSHKKYGTLNDEANLICVTRDDNKNKGNRIFCLHDLANNYKLKQFETTDDLEIEKKIADTIWDASKKDFKFGNYRSFINLTPQEQKAFRHALFLADENPIKQAVIRAINNRNRTFVNGTQRYFAEVLANNIYLRAKKENLNTDKISFDYFGIPTIGNGRGIAEIRQLYEKVDSDIQVYAKGDKPQASYSHLIDAMLAFCIAADEHRNDGSIGLEIDKNYSLYPLDKNTGEVFTKDIFSQIKITDNEFSDKKLVRKKATEGFNTHRQMTRDGIYAENYLPILIHKELDEVRKGYTWKNSEEIKIFKGKKYDIQQLNNLLYCLKFVDKPISIDIQISTLEELRNILTTNNIAATAEYYYINLKTQKLHEYYIENYNTALGYKKYTKEMEFLRSLAYRSERVKIKSIDDVKQVLDKDSNFIIGKITLPFKKEWQRLYREWQNTTIKDDYEFLKSFFNVKSITKLHKKVRKDFSLPISTNEGKFLVKRKTWDNNFIYQILNDSDSRVDGTKPFIPAFDISKNEIVEAIIDSFTSKNIFWLPKNIELQKVDNKNIFAIDTSKWFEVETPSDLRDIGVATIQYKIDNNSRPKVRVKLDYVIDDDSKINYFTNHSLLKSRYPDKVLEILKQSTIIEFESSGFNKTIKEMLGMTLAGIYNETSNN

SEQ ID NO: 964 - protein, 1629 aa, Francisella novicida
MNFKILPIAIDLGVKNTGVFSAFYQKGTSLERLDNKNGKVYELSKDSYTLLMNNRTARRHQRRGIDRKQLVKRLFKLIWTEQLNLEWDKDTQQAISFLFNRRGFSFITDGYSPEYLNIVPEQVKAILMDIFDDYNGEDDLDSYLKLATEQESKISEIYNKLMQKILEFKLMKLCTDIKDDKVSTKTLKEITSYEFELLADYLANYSESLKTQKFSYTDKQGNLKELSYYHHDKYNIQEFLKRHATINDRILDTLLTDDLDIWNFNFEKFDFDKNEEKLQNQEDKDHIQAHLHHFVFAVNKIKSEMASGGRHRSQYFQEITNVLDENNHQEGYLKNFCENLHNKKYSNLSVKNLVNLIGNLSNLELKPLRKYFNDKIHAKADHWDEQKFTETYCHWILGEWRVGVKDQDKKDGAKYSYKDLCNELKQKVTKAGLVDFLLELDPCRTIPPYLDNNNRKPPKCQSLILNPKFLDNQYPNWQQYLQELKKLQSIQNYLDSFETDLKVLKSSKDQPYFVEYKSSNQQIASGQRDYKDLDARILQFIFDRVKASDELLLNEIYFQAKKLKQKASSELEKLESSKKLDEVIANSQLSQILKSQHTNGIFEQGTFLHLVCKYYKQRQRARDSRLYIMPEYRYDKKLHKYNNTGRFDDDNQLLTYCNHKPRQKRYQLLNDLAGVLQVSPNFLKDKIGSDDDLFISKWLVEHIRGFKKACEDSLKIQKDNRGLLNHKINIARNTKGKCEKEIFNLICKIEGSEDKKGNYKHGLAYELGVLLFGEPNEASKPEFDRKIKKFNSIYSFAQIQQIAFAERKGNANTCAVCSADNAHRMQQIKITEPVEDNKDKIILSAKAQRLPAIPTRIVDGAVKKMATILAKNIVDDNWQNIKQVLSAKHQLHIPIITESNAFEFEPALADVKGKSLKDRRKKALERISPENIFKDKNNRIKEFAKGISAYSGANLTDGDFDGAKEELDHIIPRSHKKYGTLNDEANLICVTRGDNKNKGNRIFCLRDLADNYKLKQFETTDDLEIEKKIADTIWDANKKDFKFGNYRSFINLTPQEQKAFRHALFLADENPIKQAVIRAINNRNRTFVNGTQRYFAEVLANNIYLRAKKENLNTDKISFDYFGIPTIGNGRGIAEIRQLYEKVDSDIQAYAKGDKPQASYSHLIDAMLAFCIAADEHRNDGSIGLEIDKNYSLYPLDKNTGEVFTKDIFSQIKITDNEFSDKKLVRKKAIEGFNTHRQMTRDGIYAENYLPILIHKELNEVRKGYTWKNSEEIKIFKGKKYDIQQLNNLVYCLKFVDKPISIDIQISTLEELRNILTTNNIAATAEYYYINLKTQKLHEYYIENYNTALGYKKYSKEMEFLRSLAYRSERVKIKSIDDVKQVLDKDSNFIIGKITLPFKKEWQRLYREWQNTTIKDDYEFLKSFFNVKSITKLHKKVRKDFSLPISTNEGKFLVKRKTWDNNFIYQILNDSDSRVDGTKPFIPAFDISKNEIVEAIIDSFTSKNIFWLPKNIELQKVDNKNIFAIDTSKWFEVETPSDLRDIGVATIQYKIDNNSRPKVRVKLDYVIDDDSKINYFTNHSLLKSRYPDKVLEILKQSTTIEFESSGFNKTIKEMLGMTLAGIYNETSNN

SEQ ID NO: 965 - protein, 244 aa, Francisella tularensis
ARKQNSEIYNKLMQKILEFKLRKLCTDIKDDKVSTKTLKEITSYEFELLADYLANYSESLKTQKFSYTDKQGNLKELSYYHHDKYNIQEFLKRHATINDEILDTLLTDDFDIWNFNFEKFDFDKNEEKLQNQEDKDHTQAYLHHFVFAVNKIKSEMASGGRHRSQYFQEITNVLDENNHQEGYLKNFCENLHNKKYSNLSVKNLVNLVGNLSNLELKPLRKYFNDKNLIIGMSKSLQKLIATGY

SEQ ID NO: 966 - protein, 501 aa, Francisella tularensis
MEIEKKIADTIWDASKQDFKFGNYRSFINLTPQEQKAFRYALFLADENSIKQAVIRAINNRNRTFVNGTQRYFAEVLANNIYLRAKKENLNTDKISFDYFGIPTIGNGRGIADIRQLYEKVDSDIQAYAKGDKPQASYSHLIDAMIAFCVAADEHRNDGSIGLEIDKNYSLYLLDKNTGEVFTKDIFSQIKITDNEFSDKKLVRKKATEGFNTHRQMTRDGIYAENYLPILIHKELDEVRKGYTWGNSEELKIHKGKKYNIQQLNNIVYCLKFIDKSISIDIQISTLEELRNILTTNNIAATAEYYYINLKNQKLHEYYIENYNTALDYKKYSKEMEFLRSLAYRSERVKIKSIDDVKQVLDKDSNFIIGKITLPFKKEWQRLYLEWQNTTIKDDYEFLKSFFNVKSITKLHKKVRKDFSLPISTNEGKFLVKRKTWDNNFIYQILNDSDSRVDGTKPFIPAFDISKNEIVEAIIDSFTSKNIFWLPKNIELQNVDKIFLL

SEQ ID NO: 967 - protein, 158 aa, Francisella tularensis
MIDFLLELDPCITIPPYLDNNNRKPPKCQSLILNPKFLDNQYPNWQQYLQELKKLQSIQDYLDSFETDLKDLKSSKDQPYFVEYKSSNQQMASGQRDYKDLDARILQFIFDRVKASDELLLNEIYFQAKKLKQKASSELEKLESSKKLDEVIANSQLS

SEQ ID NO: 968 - protein, 878 aa, Francisella tularensis
MLNDLAGVLQVSRNQLLSSVEEWFQQAQRVGEISKSQDEQIFEWLKSFKIASYCKAAVEMQKQYRGTLKNAIQTAIFRQSENINKNKNKNKNTGNQQQALSENSKDVKSLTADEKKLLKLIENIAKASQKIGESLGLNDKQIKKFNSIYNFAQIQQIAFAERKGNANTCAVYSADNAHRMQQIKITELVEDNKDNIILSAKAQRLPAIPTRIVDGAVKKMATILAKNIVDDNWQNIKQVLSAKHQLHIPIITESNAFEFEPALADVKGKSLKDRRKKALERISPENIFKDKNNRIKEFAKGISAYSGANLTDGDFDGAKEELDHIIPRSYKKYGTLNDEVNLICVTRDDNKNKGKRIFCLNDLANNYKLKQFETTDDLEIEKKIADTIWDASKQDFKFGNYRSFINLIPQEQKAFRYALFLADENSIKQAVIRAINNRNRTFVNGTQRYFAEVLANNIYLRAKKENLNTDKISFDYFGIPTIGNGRGIADIRQLYEKVDSDIQAYAKGDKPQASYSHLIDAMIAFCVAADEHRNDGSIGLEIDKNYSLYPLDKNTGEVFTKDIFSQIKITDNEFSDKKLVRKKATEGFNTHRQMTRDGIYAENYLPILIHKELDEVRKGYTWGNSEELKIHKGKKYNIQQLNNIVYCLKFIDKSISIDIQISTLEELRNILTTNNIAATAEYYYINLKNQKLHEYYIENYNTALDYKKYSKEMEFLRSLAYRSERVKIKSIDDVKQVLDKDSNFIIGKITLPFKKEWQRLYLEWQNTTIKDDYEFLKSFFNVKSINKLHKKVRKDFSLPISTNEGKFLVKRKTWDNNFIYQILNDSDSRVDGTKPFIPAFDISKNEIVEAIIDSFTSKNIFWLPKNIELQKVDKIFLL

SEQ ID NO: 969 - protein, 292 aa, Francisella tularensis
MLNDLAGVLQVSRNQLLSSVEEWFQQAQRVGEISKSQDEQIFEWLKSFKIASYCKAAVEMQKQYRGTLKNAIQTAIFRQSENINKNKNKNTGNQQQALSENSKDVKSLTADEKKLLKLIENIAKASQKIGESLGLNDKQIKKFNSIYNFAQIQQIAFAERKGNANTCAVYSADNAHRMQQIKITELVEDNKDNIILSAKAQRLPAIPTRIVDGAVKKMVTILAKNIVDDNWQNIKQVLSAKHQLHIPIITESNAFEFEPALADVKGKSLKDRRKKALERISPENIFKDKNIC

SEQ ID NO: 970 - protein, 53 aa, Francisella tularensis
MNHSLLKSRYPDKVLEILKQSTIIEFESSGFNKTIKEMLGMTLAGIYNETSNN

SEQ ID NO: 971 - protein, 393 aa, Francisella tularensis
MNVKILPIAIDLDVKNTGVFSAFYQKGTSLEKLDNKNGKVYELSKDSYTLLMNNRTAQRHQRRGIDRKQLVKRLFKLVWTEQLNLEWDKDTQQAISFLFNRRGFSFITDGYSTEYLNIVPEQVKAILMDIFDDYNGEDDLDSYLKLATEQESKISEIYNKLMQKILEFKLRKLCTDIKDDKVSTKTLKEITSYEFELLADYLANYSESLKTQKFSYTDKQGNLKELSYYHHDKYNIQEFLKRHATINDEILDTLLTDDFDIWNFNFEKFDFDKNEEKLQNQEDKDHTQAYLHHFVFAVNKIKSEMASGGRHRSQYFQEITNVLDENNHQEGYLKNFCENLHNKKYSNLSVKNLVNLVGNLSNLELKPLRKYFNDKNLIIGMSKSLQKLIATGY

SEQ ID NO: 972 - protein, 1629 aa, Francisella tularensis
MNVKILPIAIDLGVKNTGVFSAFYQKGTSLERLDNKNGKVYELSKDSYTLLMNNRTARRHQRRGIDRKQLVKRLFKLIWTEQLNLEWDKDTQQAISFLFNRRGFSFITDGYSPEYLNIVPEQVKAILMDIFDDYNGEDDLDSYLKLATEQESKISEIYNKLMQKILEFKLRKLCTDIKDDKVSTKTLKEITSYEFELLADYLANYSEILKTQKFSYTDKQGNLKELSYYHHDKYNIQEFLKRHATINDEILDTLLTDDLDIWNFNFEKFDFDKNEEKLQNQEDKDHTQAHLHHFVFAVNKIKSEMASGGRHRGQYFQEITNVLDENNHQEGYLKNFCENLHNKKYSNLSVKNLVNLIGNLSNLELKPLRKYFNDKIHAKADHWDEQKFTETYCHWILGEWRVGVKDQDKKDGAKYSYKDLCNELKQKVTKAGLVDFLLELDPCRTIPPYLDNNNRKPPKCQSLILNPKFLDNQYPNWQQYLQELKKLQSIQNYLESFETDLKVLKSSKDQPYFVEYKSSNQQIASGQRDYKDLDARILQFIFDRVKASDELLLNEIYFQAKKLKQKASSELEKLESSKKLDEVIANSQLSQILKSQHTNGIFEQGTFLHLVCKYYKQRQRARDSRLYIMPEYRYDKKLDKYNNTGRFDDDNQLLTYCNHKPRQKRYQLLNDLAGVLQVSPNFLKDKIGSDDDLFISKWLVEHIRGFKKACEDSLKIQKDNRGLLNHKINIARNTKGKCEKEIFNLICKIEGSEDKKGNYKHGLAYELGVLLFGEPNEASKPEFDRKIKKFNSIYSFAQIQQIAFAERKGNANTCAVCSADNAHRMQQIKITEPVEDNKDKIILSAKAQRLPAIPTRIVDGAVKKMATILAKNIVDDNWQNIKQVLSAKHQLHIPIITESNAFEFEPALADVKGKSIKDRRKKALERISPENIFKDKNNRIKEFAKGISAYSGDNLASGDFDGAKEELDHIIPRSHKKYGTLNDEANLICVTRDDNKNKGNRIFCLHDLANNYKLKQFETTDDLEIEKKIADTIWDASKKDFKFGNYRSFINLTPQEQKAFRHALFLADENPIKQAVIRAINNRNRTFVNGTQRYFAEVLANNIYLRAKKENLNTDKISFDYFGIPTIGNGRGIVEIRQLYEKVDSDIQAYAKGDKPQASYSHLIDAMLAFCIAADEHRNDGSIGLEIDKNYSLYPLDKNTGEVFTKDIFSQIKITNNEFSDKKLVRKKATEGFNTHRQMTRDGIYAENYLPILIHKELDEVRKGYTWGNSEELKIHKGKKYDIQQLNNLVYCLKFIDKSISIDIQISTLEELRNILTTNNIATTAEYYYINLKTQKLHEYYIENYNTALGYKKYTKEMEFLRSLAYRSERVKIKSIDDVKQVLDKDSNFIIGKITLPFKKEWQRLYREWQNTTIKDDYEFLKSFFNVKSITKLHKKVRKDFSLPISTNEGKFLVKRKTWDNNFIYQILNDSDSRVDGTKPFIPAFDISKNEIVEAIIDSFTSKNIFWLPKNIELQKVDNKNIFAIDTSKWFEVETPSDLRDIGVATIQYKIDNNSRPKVRVKLDYVIDDDSKINYFTNHSLLKSRYPDKVLEILKQSTIIEFESSGFNKTIKEMLGMTLAGIYNETSNN

SEQ ID NO: 973 - protein, 285 aa, Francisella tularensis
MTRDGIYAENYLPILIHKELDEVRKGYTWGNSEELKIHKGKKYNIQQLNNIVYCLKFIDKSISIDIQISTLEELRNILTTNNIAATAEYYYINLKNQKLHEYYIENYNTALDYKKYSKEMEFLRSLAYRSERVKIKSIDDVKQVLDKDSNFIIGKITLPFKKEWQRLYLEWQNTTIKDDYEFLKSFFNVKSITKLHKKVRKDFSLPISTNEGKFLVKRKTWDNNFIYQILNDSDSRVDGTKPFIPAFDISKNEIVEAIIDSFTSKNIFWLPKNIELQKVDKIFLL

SEQ ID NO: 974 - protein, 1323 aa, Fructobacillus fructosus
MVYDVGLDIGTGSVGWVALDENGKLARAKGKNLVGVRLFDTAQTAADRRGFRTTRRRLSRRKWRLRLLDELFSAEINEIDSSFFQRLKYSYVHPKDEENKAHYYGGYLFPTEEETKKFHRSYPTIYHLRQELMAQPNKRFDIREIYLAIHHLVKYRGHFLSSQEKITIGSTYNPEDLANAIEVYADEKGLSWELNNPEQLTEIISGEAGYGLNKSMKADEALKLFEFDNNQDKVAIKTLLAGLTGNQIDFAKLFGKDISDKDEAKLWKLKLDDEALEEKSQTILSQLTDEEIELFHAVVQAYDGFVLIGLLNGADSVSAAMVQLYDQHREDRKLLKSLAQKAGLKHKRFSEIYEQLALATDEATIKNGISTARELVEESNLSKEVKEDTLRRLDENEFLPKQRTKANSVIPHQLHLAELQKILQNQGQYYPFLLDTFEKEDGQDNKIEELLRFRIPYYVGPLVTKKDVEHAGGDADNHWVERNEGFEKSRVTPWNFDKVFNRDKAARDFIERLTGNDTYLIGEKTLPQNSLRYQLFTVLNELNNVRVNGKKFDSKTKADLINDLFKARKTVSLSALKDYLKAQGKGDVTITGLADESKFNSSLSSYNDLKKTFDAEYLENEDNQETLEKIIEIQTVFEDSKIASRELSKLPLDDDQVKKLSQTHYTGWGRLSEKLLDSKIIDERGQKVSILDKLKSTSQNFMSIINNDKYGVQAWITEQNTGSSKLTFDEKVNELTTSPANKRGIKQSFAVLNDIKKAMKEEPRRVYLEFAREDQTSVRSVPRYNQLKEKYQSKSLSEEAKVLKKTLDGNKNKMSDDRYFLYFQQQGKDMYTGRPINFERLSQDYDIDHIIPQAFTKDDSLDNRVLVSRPENARKSDSFAYTDEVQKQDGSLWTSLLKSGFINRKKYERLTKAGKYLDGQKTGFIARQLVETRQIIKNVASLIEGEYENSKAVAIRSEITADMRLLVGIKKHREINSFHHAFDALLITAAGQYMQNRYPDRDSTNVYNEFDRYTNDYLKNLRQLSSRDEVRRLKSFGFVVGTMRKGNEDWSEENTSYLRKVMMFKNILTTKKTEKDRGPLNKETIFSPKSGKKLIPLNSKRSDTALYGGYSNVYSAYMTLVRANGKNLLIKIPISIANQIEVGNLKINDYIVNNPAIKKFEKILISKLPLGQLVNEDGNLIYLASNEYRHNAKQLWLSTTDADKIASISENSSDEELLEAYDILTSENVKNRFPFFKKDIDKLSQVRDEFLDSDKRIAVIQTILRGLQIDAAYQAPVKIISKKVSDWHKLQQSGGIKLSDNSEMIYQSATGIFETRVKISDLL

SEQ ID NO: 975 - protein, 1367 aa, Fusobacterium sp.
MKKQKFSDYYLGFDIGTNSVGWCVTDLDYNVLRFNKKDMWGSRLFDEAKTAAERRVQRNSRRRLKRRKWRLNLLEEIFSDEIMKIDSNFFRRLKESSLWLEDKNSKEKFTLFNDDNYKDYDFYKQYPTIFHLRDELIKNPEKKDIRLIYLALHSIFKSRGHFLFEGQNLKEIKNFETLYNNLISFLEDNGINKSIDKDNIKKLEKIICDSGKGLKDKEKEFKEIFNSDKQLVAIFKLSVGSSVSLNDLFDTDEYKKEEVEKEKISFREQIYEDDKPIYYSILGEKIELLDIAKSFYDFMVLNNILSDSNYISEAKVKLYEEHKKDLKNLKYIIRKYNKENYDKLFKDKNENNYPAYIGLNKEKGKKEVVEKSGLKIDDLIKVIKGYLPKPERIEEKDKTIFNEILNKIELKTILPKQRISDNGTLPYQIHEVELEKILENQSKYYDFLNYEENGVSTKDKLLKTFKFRIPYYVGPLNSYHKDKGGNSWIVRKEEGKILPWNFEQKVDIEKSAEEFIKRMTNKCTYLNGEDVIPKDSFLYSEYIILNELNKVQVNDEFLNEENKRKIIDELFKENKKVSEKKFKEYLLVNQIANRTVELKGIKDSFNSNYVSYIKFKDIFGEKLNLDIYKEISEKSILWKCLYGDDKKIFEKKIKNEYGDILNKDEIKKINSFKFNTWGRLSEKLLTGIEFINLETGECYSSVMEALRRTNYNLMELLSSKFTLQESIDNGNKEMNEVSYRDLIEESYVSPSLKRAILQTLKIYEEIKKITGRVPKKVFIEMARGGDETMKNKKIPARQEQLKKLYDSCGNDIANFSIDIKKMKSSLSSYDNNSLRQKKLYLYYLQFGKCMYTGREIDLDRLLQNNDTYDIDHIYPRSKVIKDDSFDNLVLVLKNENAEKSNEYPVKKEIQEKMKSFWRFLKEKNFISDEKYKRLTGKDDFELRGFMARQLVNVRQTTKEVGKILQQIEPEIKIVYSKAEIASSFREMFDFIKVRELNDTHHAKDAYLNIVAGNVYNTKFTEKPYRYLQEIKENYDVKKIYNYDIKNAWDKENSLEIVKKNMKKNTVNITRFIKEEKGQLFDLNPIKKGETSNEIISIKPKLYNGKEEKLNEKYGYYKSLNPAYFLYVEHKEKNKRIKSFERVNLVDVNNIKDEKSLVKYLIENKKLVEPRLIKKVYKRQVILINDYPYSIVALDSNKLMDFENLKPLFLENKYEKILKNVIKFLEDNQGKSEENYKFIYLKKKDRYEKNETLESVKDRYNLEFNEMYDKFLEKLDSKDYKNYINNKKYKNLLDVKEKFIKLNLFDKAFTLKSFLDLFNRKTMADFSKVGLTKYLGKIQKISSNVLSKNELYLLEESVTGLFVKKIKL

SEQ ID NO: 976 - protein, 1367 aa, Fusobacterium sp.
MKKQKFSDYYLGFDIGTNSVGWCVTDLDYNVLRFNKKDMWGSRLFDEAKTAAERRVQRNSRRRLKRRKWRLNLLEEIFSDEIMKIDSNFFRRLKESSLWLEDKNSKEKFTLFNDDNYKDYDFYKQYPTIFHLRDELIKNPEKKDIRLIYLALHSIFKSRGHFLFEGQNLKEIKNFETLYNNLISFLEDNGINKSIDKDNIKKLEKIICDSGKGLKDKEKEFKEIFNSDKQLVAIFKLSVGSSVSLNDLFDTDEYKKEEVEKEKISFREQIYEDDKPIYYSILGEKIELLDIAKSFYDFMVLNNILSDSNYISEAKVKLYEEHKKDLKNLKYIIRKYNKENYDKLFKDKNENNYPAYIGLNKEKGKKEVVEKSGLKIDDLIKVIKGYLPKPERIEEKDKIIFNEILNKIELKTILPKQRISDNGTLPYQIHEVELEKILENQSKYYDFLNYEENGVSTKDKLLKTFKFRIPYYVGPLNSYHKDKGGNSWIVRKEEGKILPWNFEQKVDIEKSAEEFIKRMTNKCTYLNGEDVIPKDSFLYSEYIILNELNKVQVNDEFLNEENKRKIIDELFKENKKVSEKKFKEYLLVNQIANRTVELKGIKDSFNSNYVSYIKFKDIFGEKLNLDIYKEISEKSILWKCLYGDDKKIFEKKIKNEYGDILNKDEIKKINSFKFNTWGRLSEKLLTGIEFINLETGECYSSVMEALRRTNYNLMELLSSKFTLQESIDNGNKEMNEVSYRDLIEESYVSPSLKRAILQTLKIYEEIKKITGRVPKKVFIEMARGGDETMKNKKIPARQEQLKKLYDSCGNDIANFSIDIKKMKSSLSSYDNNSLRQKKLYLYYLQFGKCMYTGREIDLDRLLQNNDTYDIDHIYPRSKVIKDDSFDNLVLVLKNENAEKSNEYPVKKEIQEKMKSFWRFLKEKNFISDEKYKRLTGKDDFELRGFMARQLVNVRQTTKEVGKILQQIEPEIKIVYSKAEIASSFREMFDFIKVRELNDTHHAKDAYLNIVAGNVYNTKFTEKPYRYLQEIKENYDVKKIYNYDIKNAWDKENSLEIVKKNMKKNTVNITRFIKEEKGQLFDLNPIKKGETSNEIISIKPKLYNGKEEKLNEKYGYYKSLNPAYFLYVEHKEKNKRIKSFERVNLVDVNNIKDEKSLVKYLIENKKLVEPRLIKKVYKRQVILINDYPYSIVALDSNKLMDFENLKPLFLENKYEKILKNVIKFLEDNQGKSEENYKFIYLKKKDRYEKNETLESVKDRYNLEFNEMYDKFLEKLDSKDYKNYINNKKYKNLLDVKEKFIKLNLFDKAFTLKSFLDLFNRKTMADFSKVGLTKYLGKIQKISSNVLSKNELYLLEESVTGLFVKKIKL

SEQ ID NO: 977 - protein, 1367 aa, Fusobacterium sp.
MKKQQFSDYYLGFDIGTNSVGWCVTDFNYNVLRFNKKDMWGSRLFDEAKTAAERRVQRNSRRRLKRRKWRLNLLEEIFSDEILKIDSNFFRRLKESSLWLEDKSSKEKFTLFNDDNYKDYDFYKQYPTIFHLRNELIKNPEKKDIRLVYLALHSIFKSRGHFLFEGQNLKDIKNFETLYNNLMAFLEDNDIYKNIDSSYIGNLENIICDSKKGLKDKEKEFKEIFNSDKQLVGFFKLSVGSSVSLNDLFDTDEYKKGEVEKEKISFREQIYEDDKPIYYSILGEKIEFLDIAKSFYDFMVLNNILADSQYISEAKVKLYDEHKRDLKNLKYIIRKYNKENYDKLFKDKNESNYSAYIGLNKEKGKKEVIEKSRLKIDDFAKIIKGYLPKAEKIDEKDRSIFNEILDKIELKTILPKQRISDNGTLPYQIHEAELEKILENQAKYYDFLNHEENGISTKDKLLMTFKFRIPYYVGPLNSYHKNKGGNSWIVRKEEGKILPWNFEQKVDIEKSAEEFIKRMTNKCTYLNGEDVIPKDSFLYSEYIILNELNKVQVNDEFLNKEIKKKIIEDLFKKSKKISEKNFREYLLVNQITNKTVELKGVKDAFNSNYVSYIKFKDIFGDKLNLDIYKEISEKSILWKCLYGDDKKIFEKKIKSVYGDILTKDEIKKINSFKFNTWGRLSEKLLTEIEFIDLETGECYSSVMDALRRTNYNLMELLSSKFTLQENIDNENKEVSEFSYRDLVEESYVSPSLKRAILQTLKIYEEIRKITGRIPKKVFIEMARGGDETMKNKKIPARQEQLKKLYDSCGKDISNFSIDIKEMKNSLNSYDNNSLRQKKLYLYYLQFGKCMYTGKEIDLNRLLQNNDTYDIDHIYPRSKVIKDDSFDNLVLVLKNENAEKSNEYPLKKEIQEKMKSFWKFLKEKNFISDEKYKRLTGKDEFELRGFMARQLVNVRQTTKEAGKILQQIEPEIKIVYSKAEIASSFREMFDFIKVRELNDTHHAKDAYLNIVAGNVYNTKFTEKPYRYLQEIKENYDVKKIYNYDIKNAWDKEKSLEIVKKNMEKNTVNITRFIKEEKGQLFDLNPIRKGETSNEIIAIKPKFYEGSTEKLNEKYGYYKSLNPAYFIYVEHKEKNKIIRSFERVNLVDVNKIKDEKSLIKYLIENKGLIEPKVIKKVYKRQVILINNFPYSIVALDSNKLMDFENLKPLFLERKYEKILKNAIKFLEDNQGKTEEYYKFLYLKKKDRNEKNETIDSVKERYNIEFNEMYDKFLEKLDSKDYKNYINNKKYSELVNVKEKFIKLNLFDKAFTLKSFLDLFNRKTMADFSKVGLTKYLGKIQKISSNVLSKNELHLLEESVTGLFVKKIKL

SEQ ID NO: 978 - protein, 1391 aa, Galbibacter sp.
MKTILGLDLGTNSIGWALVKEAENENEVSDIIKLGVRVNPLTVDELTNFEGGKAYSNNAERTLKRGARRNLQRYKLRRENLIEILLKNGLINKDTALTEVGKETTHQTLKLRSKSANEKVSLEDLAKILLSINKKRGYKSSRKVNAEDDGVAIDGMEVAKLLYDENMTPGEYVLRLLESGKKHLPDFYRSDLQEEFNLVWKKQSEFYPLILTKELFFELHGKNKSQTWAICKEPLGIVGVKLKGSAKEQKFARYRLRKEALTQQIELEHLAIVLQDINNDSNKSSGYLGAISDRSKELFFNKETVGQYQYKQLQKDPNTSLKNQVFYRQDYLDEFEVIWRNQAKFYPQLTNELKQEIRDVVIFYQRKLKSQKNLISFCQFESTQQNYVEKETGKTKIRTIGRRVIPRSSPLFQEFKIWQSLNNLKFVNSESNQIIQFIELEDDVKKVVFDELNLRGDLKPNQVLKILSKYMKIGKLTQWKCNLEEIEGNRTNSALYNVFQMIAEEEGYGFNWGKKSALEIKSELKAIFSSIGINDSILDFDFSKKLDQQLSYQLWHLLYSAEEGNSKITEEDKFTYGNTGVALKKKLHLKFGFKPEYSTLISNLRFTSDYGNLSSKAISKILPFLRDGSDYSKACQYAGYNHSNSLSADELDNRELKPKLELLKKNSLRNPVVEKILNQMVNVVNQVIDNYGKPDEVRIELARELKKSAKERSQMTKNISDATRRNAEIKKYLSKEFGIPNPTKGDVIRYRLWEELASNGYKDLFRDKYIPKEKLFSNEIDIEHIIPKALLFDDSFSNKTLAFKVDNLKKADRTAFDFMSTDFSKDVDSYIGRIETLHKDGKISSSKYKKLMIPKSKLVDGFIERDLRNTQYIAKQARKMLLEVFKTVVPTTGKITDKLREDWDLINVMKELNFPKYKALGLTKKIERFDVGSEKIKSINVIEGWSKRNDHRHHAMDALAVAFTTHNHIQYLNYLNARKDIHHEMHGTIKSIENQIIGKDVMGKRRFIPPISDLRMKAKLQIESILISFKNKNKVVTWSVNKTKLKGKDNYNKRRQLTPRGQLHKETVYGKIKLIDPKPLKLNNKFTLVRASMIVDKVHREIVLQHLSKYDNNSEVAFDSKTIKIDPILIEGIGLKEVVCYEDVFKIRKKISGDNFKNEKHLEKVIDEKVKQILKDRVIKFQGNFKEAFSNLEENPIWLNKSKGIAVKSVAIKGVNNAESLHEGKDHFGDQILDKNKKQIPVDFVSTGNNHHVGIYEDKDGNLQERVVSFFEAVTRVNEGLPIIDKTYNSDIGWKFKFTMKQNEMFVFPSDDFDPNEFDLTDGKNAAKISPNLYRVQKIATKNYMFRHHLETVVTNDLEFTYKSIRSTGWLRNLVKVRINHLGEIVYVGEY

SEQ ID NO: 979 - protein, 1186 aa, Gardnerella vaginalis
MEGNISYAIGIDVGLNSVGLAAIRLDDYGEPIRILKAMSVIHDAGIDPNGAKESDTRKAISGVARRVRRLYRQRRRRLQKLDFLLQSLGWPVVENKDLDFSDSFIPWIFRAKLADEYIADEEQRKQMLSVAIRHIARHRGWRNPYQSIKSMMQETEYSEFYNELLKNIEKLAPGVGCEGSTPAQLVRDYLLSQQGKASRRLRITTGGRRKNHPHSLDPVLPRKLMQSDNMLEILNIFNVQHIDDKYVREQIINAVFYAESPRGSAENRVGKDAITGKGKRALKASLAFQKYRIISTISNLRIRENSKERCLTIEEKQNVYKLLTTSIDKSSKRKSAEAPLYTWIDVADCLGIERYKLRGVGSQIGDGESVGNRPPMLNSELAILYANNKSLGQSLITWWLASNRTQEDKEALIEILSNTVDIEAIHDNPEYQDKYGSAIAFIDSMNETEIAALENISLPDGRAAYSLETLDELNKQMLETDDDLFEARKKLFNLPNNWRPAEAPIAEPTGNPSVDRVLKIVHRFLISAKNRWGNPERINIEHVRSGFQSKKMANSYKELLDKRTEGKENLKAMMRNSLHLGTSDSISDADIRRYEAVQRQNGQCLYCGSEITYHTCELDHIVPRKGPGSTNTRENLVATCSSCNAQKCNTPFATWCEQSTYCKNHDISADSAINRVRAFIFPPNSYDKRGANQFKKEVIARLKQKVGDEAFDNRSIESVAWMANELHRRIDWYYNSQNYQTNNGISDISNKAQTNVGVYAGSLTAIARRMSGIDGKLEFFDGRRKTRFDRRHHAVDASVIAMMTPGIAQILAIKCNLRETQLLQGNKVVPGGIDWKEYPTANDQGYQQYANWSVRMNALLKLLNEEMRADRIAVVNSIRLRYSNSSVHQYEVNALLKLHVGDEIDSETIRRSSTPALYCALTRNPDYDVNNGFPENPGRTILLHNKKLNADDSITFFKAQAVQLFVREGSAKIGNSIHHLRIYEYFEKLKSGKIKKSYGMIRVFQNDLHRHIHEDLFSCDLPEQSISMRYADTKVAHAVQTGNANYLGYLVPGDEIIVDFSHITLSENIGKFVEFLNKIGADCTAYRHWVVVGTDTEKVLILKPSMISSEGIDKLYSNCERNNFDYSSYEKSINEILAGKGWRVSVNVLAQYKAATIRRNALGEVRWASRSHLPISWSWDTGENRE

SEQ ID NO: 980 - protein, 1186 aa, Gardnerella vaginalis
MEGNISYAIGIDVGLNSVGLAAIRLDNNGEPIRILKAMSVIHDAGIDPNGAKESDTRKAISGVARRVRRLYRQRRRRLQKLDFLLHSLGFPVVENKDLDFSDSFIPWIFRAKLADEYIADEKQRKQMLSVAIRHIARHRGWRNPYQSIKSMTQETEYSEFYNELLKNIEKFAPGVGCEGSTPAQLVRDYLLLQQGKASRRLRITTDEKRKNHPNSLNPILPRKLMQSDNMLEILNIFNVQHIDDKYVREQIINAVFYAKSPRGSAENRVGKDAITGKGKRALKASLAFQKYRIISTISNLRIRENSKERCLTIEEKQSVYKLLTTSTDESSKEKSAEAPLYTWIDVADCLGIERYKLRGVGSQIGDGESVGNRPPMLNSELAIIYANNKSLGKSLLTWWLDANRTQEDKEALIEILSNTVDIEAIHDNPEYQDKYGSAIAFIDSMDETEIAALENISLPDGRAAYSLETLDKLNKQMLETDDDLFEARKKLFNLPNNWRPSEAPIAEPTGNPSVDRVLKIVHRFLISAKNRWGNPERINIEHVRSGFKSKKMANSYKELLDKRTKGKENLKAMMRNSLHLGMSDSISDADIRRYEAVQRQNGQCLYCGSEITYHTCELDHIVPRKGPGSTNTRENLVATCSLCNAQKCNTPFSTWCEQSTYCKNHDISVDSAINRVRAFIFPPNSYDKRGANQFKKEVIARLKQKVGDEAFDNRSIESVAWMANELHRRIDWYYNSQNYQTNNGISDITNKAQTNVGVYAGSLTAIARRMSGIDGKLEFFDGRRKTRFDRRHHAVDASVIAMMTPGIAQILAIKCNLRETQLLQGNKVVPGGIDWKEYPTANDQGYQQYANWSVRMNALLKLLNEEMRADRIAVVNSIRLRYNNSSVHQYKVNALLKLHVGDEIDSGTIRRSSTPALYCALTRNPDYDVNNGLPENPNRAILLHDKKLNADDSITFFKAQAVQLFVREGSAEIGSSTHHLRIYEYFKKLKSGKIKKSYGMIRVFQNDLHRHIHEDLFSCDLPEQSISMRYADTEVAHAVQTGNSNYLGYLVPGDEIIVDFSHVKLSGNIGTFVEFLNKIGANCAAYNHWVVVGTDTEKVLILKPSMISSEGIDKLYSNCKRNNFDYSSYEKSINEILVGKGWRVSVNVLAKYNAETIRRNALGEVRWTSRSHLPISWSWNTGENRE

SEQ ID NO: 981 - protein, 1258 aa, Gemella haemolysans
MTEENPDIRKVFLAIHHILKNRGHFLLQGQSFKEGNLNNLIKELLNLDILHISIEITEENINKITEIALEKKTLTDKVNDLKKIYPKEKQLLEAFRLIFGGKTSLDKLFAIDEYKELDASVKSVSFKEKIYEEVRHDYEQVLSNYIELLDLAKLVYDSIILSDIKKEGKTLSESKVELYHKHREDLTKLKTLVKNDSKLSEDKKVELYSAIFKEDKDKGTNYVNYIRKSEEGKGCNYEDFKKFLVKELAKLEESSAKEEILRDLELELFLPLQRTKDNSVVPYQIHKEELVKILDNAAKYHKFLNEKDDSGYSIIEKVIQLLEFRIPYYVGPLNSSKKAKVDGFAWSVRNKGYENTPVTPWNYEKVIDESASAEKFITNLTNKCTYLKGEDVLPKSSLLYSEFALLNELNALKYDGNRISLEARNVIIEKLFKEQGKKVTKTSIKNLLKAEGYIDGKGEITGIDITVKNDLKSYRDFKKILGDKFNTEHVENIILWITLYGESRKLIKAKIEAVYGDIYSKEEIAKMSRLVYKDWGRFSRKLLTELVSKKLYNEETGECLNIIGAMRQNNILFMELLADRFDYSQQIIDYNKELQKEVTEITPEILDDLYVSPSVKRSIWQTVRIVEELKKIIGCAPAKIFVETTRSNQDKKKPTDSRKKQLELFYKAVKKDVKDLEKEIGSLNFDKLNERLSSVEPSKLKAKKLYLYYTQLGRCMYSGETIDITQLNTTAYDIDHIYPQSKVKDDSFTNTVLVKREYNAAKTDRYPLGSDIQTPSNRRFWKFLKEKGLITDEKYNRLVRTEEFSDEELTGFIARQLVETSQSVKAVAGILGELNPKTSICYSKAENVSSFRQNFGKIKEGNRKSDNTEQLIKVREINDYHHAKDAYLNVVVGNVYDTKFTRNVFNFIKDKKDGRKYSLNNVFYENVSNSNNVAWELNKTVHQVEKVMNNNNILVTRRTSEQKGGLFDATVYKAKVAAKAKEGVYYPLKTSDPVVNDVTKYGGFTKVKIAYYSIFEYTLVNKKGEEKITRIIPIPIYVSQNIKDDSTLLEFGKTQINIKSGEEVKDFKLKYRKLCIGDLVKINNFFNFIGGKTNDSFVYDGAVQVTLDTESERYIKTLSKYQNWKKENKDGELWESITKEKNTELYNLLVEKMNSGIFIKKKPNKFNELNSEEIRNNFSSISLEEQAKVLLEVLNLLTNKKSIFDLKSINITAARGKISFNLSNLSQFSIIEQSVAGFYEKEITIIGDKENDMENNNC

SEQ ID NO: 982 - protein, 1054 aa, Haemophilus parainfluenzae
MENKNLNYILGLDLGIASVGWAVVEIDEKENPLRLIDVGVRTFERAEVPKTGESLALSRRLARSARRLTQRRVARLKKAKRLLKSENILLSTDERLPHQVWQLRVEGLDHKLERQEWAAVLLHLIKHRGYLSQRKNESKSENKELGALLSGVDNNHKLLQQATYRSPAELAVKKFEVEEGHIRNQQGAYTHTFSRLDLLAEMELLFSRQQHFGNPFASEKLLENLTALLMWQKPALSGEAILKMLGKCTFEDEYKAAKNTYSAERFVWITKLNNLRIQENGLERALNDNERLALMEQPYDKNRLFYSQVRSILKLSDEAIFKGLRYSGEDKKAIETKAVLMEMKAYHQIRKVLEGNNLKAEWAELKANPTLLDEIGTAFSLYKTDEDISAYLAGKLSQPVLNALLENLSFDKFIQLSLKALYKLLPLMQQGLRYDEACREIYGDHYGKKTEENHHFLPQIPADEIRNPVVLRTLTQARKVINGVVRLYGSPARIHIETGREVGKSYKDRRELEKRQEENRKQRENAIKEFKEYFPHFAGEPKAKDILKMRLYKQQNAKCLYSGKPIELHRLLEKGYVEVDHALPFSRTWDDSFNNKVLVLANENQNKGNLTPFEWLDGKHNSERWRAFKALVETSAFPYAKKQRILSQKLDEKGFIERNLNDTRYVARFLCNFIADNMHLTGEGKRKVFASNGQITALLRSRWGLAKSREDNDRHHALDAVVVACSTVAMQQKITRFVRFEAGDVFTGERIDRETGEIIPLHFPTPWQFFKQEVEIRIFSDNPKLELENRLPDRPQANHEFVQPLFVSRMPTRKMTGQGHMETVKSAKRLNEGISVIKMPLTKLKLKDLELMVNREREKDLYDTLKARLEAFNDDPAKAFAEPFIKKGGAIVKSVRVEQIQKSGVLVREGNGVADNASMVRVDVFTKGGKYFLVPIYTWQVAKGILPNKAATQYKDEEDWEVMDNSATFKFSLHPNDLVKLVTKKKTILGYFNGLNRATGNIDIKEHDLDKSKGKQGIFEGVGIKLALSFEKYQVDELGKNIRLCKPSKRQPVR

SEQ ID NO: 983 - protein, 1052 aa, Haemophilus parainfluenzae]
MKNTSLNYVLGLDLGISSVGWAVVEIDEKENPLSLIDVGVRTFERAETQKGESLALARRLARSARRLTQRRVARLKKAKRLLKSENILLSTDECLPHQVWQLRVEGLERKLERQEWAAVLLHLIKHRGYLSQRKNESKSENKELGALLSGVANNHKLLQQTTYRTPAELAVKKFEVEEGHIRNQQGSYTHTFSRLDLLSEMELLFSRQQHFGNPFTSEKLLENLTALLMWQKPALSGDAILKMLGKCTFENEYKAAKHTYSAERFIWITKLNNLRIQENGLERALNDNERLALMKQPYEKAKLTYAQVRSILNLSDEAIFKGLRYSGEDKKTSETKTVLMEMKAYHQIRLALEKNDLKTEWAELKVNSSLLDEIGTAFSLYKTDEDISTCLAGKLSQPVLNALLENLNFDKFIQLSLKALHKILPLMQQGLRYDEACAEIYGDHYGKKTEENHLLLPQIPADEIRNPVVLRTLTQARKVINGVVRLYSSPARIHIETGREVGKSYQDRRELEKRQEENRKQREKAISEIKTLFPNFSGEPKAKDILKMRLYYQQNAKCLYSGKPLELHRLLEQGYVEIDHALPFSRTWDDSFNNKVLVLANENQNKGNLTPFEWLDGKNNSERWKAFKALVETSAFPYTKKQRILSQKLDEKGFIERNLNDTRYVARFLCNFIADNMHLTGEGKRKVFASNGQITALLRGRWGLAKSREDNDRHHALDAVVVACSTVSMQQKITRFVRFEEGNVFTGERIDRETGEIIPLHFPAPWKFFREEVEIRIFSDNPKLELENRLIARPQANHEFVQPLFVSRMPTRKMIGQGHMETIKSAKRLNEGLSVIKMLLTKLRLKDLESMVNREREKELYEALKARLEAFNDEPAKAFAEPFMKKGGAIVKSVRVEQVQKSGVLVRDGNGVADNASMVRVDVFTKGGKYFLVPIYTWQVAKGILPNKAVIQGKNEEDWEVMDDATFRFSLHQNDLVKLVTKKKTIFGYFNGLNRATGNIDIKEHDLEKSKVKDGIHQSIGIKLALSFEKYQVDELGKNIRLCKSSKRQAVR

SEQ ID NO: 984 - protein, 121 aa, Haemophilus pittmaniae
MLNRRYAAKITRFVRFEAGDVFTGERIDRETGEIIPLHFPTPWQFFKQEVEIRIFSDNPKLELENRLPDRPQANHEFVQPLFVSRMPTRKMTGQGHMETVKSAKRLNEGISVIKMPLTKLN

SEQ ID NO: 985 - protein, 203 aa, Haemophilus pittmaniae
MVNREREKDLYDALKARLEAFNDDPAKAFAEPFIKKGGAIVKSVRVEQVQKSGVLVREGNGVADNASMVRVDVFTKDGKYFLVPIYTWQVAKGILPNKAATQYKDEEDWEVMDNSAIFKFSLHPNDLVKLVTKKKTILGYFNGLDRATGNIAIKEHDLEKSKAKGGIHQGVGIKLALSFEKYQIDELGKNIRLCNPSKCQSVR

SEQ ID NO: 986 - protein, 1052 aa, Haemophilus sputorum
MKNTSLNYVLGLDLGISSVGWAVVEIDEKENPLSLIDVGVRTFERAETQKGESLALARRLARSARRLTQRRVARLKKAKRLLKSENILLSTDECLPHQVWQLRVEGLERKLERQEWAAVLLHLIKHRGYLSQRKNESKSENKELGALLSGVANNHKLLQQTTYRTPAELAVKKFEVEEGHIRNQQGSYTHTFSRLDLLSEMELLFSRQQHFGNPFTSEKLLENLTALLMWQKPALSGDAILKMLGKCTFENEYKAAKHTYSAERFIWITKLNNLRIQENGLERALNDNERLALMKQPYEKAKLTYAQVRSILNLSDEAIFKGLRYSGEDKKTSETKTVLMEMKAYHQIRLALEKNDLKTEWAELKVNSSLLDEIGTAFSLYKTDEDISTCLAGKLSQPVLNALLENLNFDKFIQLSLKALHKILPLMQQGLRYDEACAEIYGDHYGKKTEENHLLLPQIPADEIRNPVVLRTLTQARKVINGVVRLYSSPARIHIETGREVGKSYQDRRELEKRQEENRKQREKAISEIKTLFPNFSGEPKAKDILKMRLYYQQNAKCLYSGKPLELHRLLEQGYVEIDHALPFSRTWDDSFNNKVLVLANENQNKGNLTPFEWLDGKNNSERWKAFKALVETSAFPYTKKQRILSQKLDEKGFIERNLNDTRYVARFLCNFIADNMHLTGEGKRKVFASNGQITALLRGRWGLAKSREDNDRHHALDAVVVACSTVSMQQKITRFVRFEEGNVFTGERIDRETGEIIPLHFPAPWKFFREEVEIRIFSDNPKLELENRLIARPQANHEFVQPLFVSRMPTRKMTGQGHMETIKSAKRLNEGLSVIKMLLTKLRLKDLESMVNREREKELYEALKARLEAFNDEPAKAFAEPFMKKGGAIVKSVRVEQVQKSGVLVRDGNGVADNASMVRVDVFTKGGKYFLVPIYTWQVAKGILPNKAVIQGKNEEDWEVMDDATFRFSLHQNDLVKLVTKKKTIFGYFNGLNRATGNIDIKEHDLEKSKVKDGIHQSIGIKLALSFEKYQVDELGKNIRLCKSSKRQAVR

SEQ ID NO: 987 - protein, 1338 aa, Helcococcus kunzii
MQDYYLGLDIGTNSVGWAVTDENYNLLRKKGKDLWGVRLFKEAQPATERRGHRSSRRRTIRKSLRKQLLRELFEEEINAIDKDFFLRLDESKYWLEDKKIEGKYSLFNDENFTDKDYYEKFPTIFHLRKALIESDDKEDIRLYFLAINQMMKRRGHFLIDGKLSNVEDITPFKECIQNLINEELDTEIETEFYDKAIKIVSDYSLKKTEKKNLIKDLVKETDSIEDSKKIINIFNLLISGKSKVNGIFDDEEILEKIKEDNKEDFYLTSEKYEENLEYFSQLLDYRFELISSLKSIYDYIILQEVLKGKKYLSYAQVERYKNHKEDLRKLKQLIKKYDKNGKIYYQIFRDENFKKGYVAYLGYYKKNKKNVPVKKCDYDTFSKNIKSTLDKICDKEDPLYIELIDKIEKGGFLLKQIVSTNSVIPHQVHELELDKILENLEKNYPSFKEISDGVSKIDKIKMIFNFRIPYYVGPLNDYHKDKVNSNTWIVKNEGFENENIRPWNFSKIVDEHACEEEFIKRMINECSYIPGEKVLPKSSLLYSEYMVLNELNNLRVNGDKLNPKIKKEIVENIYKKERKVTLKKIRNFLIINNYVDSKVEFSGLSDGIKANMSSYIDFAEILDDNFDNNMVEDLIEQITIHVGNVKLLTEKISNKYPNLEKKQINKIVNLKFKDWARFSRKLLVGIEGTEKETGEINTIIGFLRETNENFMELMSNRYTFSEEISEIKKKYIPNKLSKQIVDDLYVSPAVKKMIWQVLNINDELIKVLGKQPKKIFIEMARGKEEKPEVKDSRKNKLIELYKNLGKEGKEWLNRIEDKTEADFRNRALYLYYTQMGRCMYTGEIIDIERLYDKELYDLDHIIPRKMKKDDSIHKNLVLVTRNSNQYEKKDNYPVPEVIKSRENVRHLWYALKKKGLITEEKYNRLTRINPLSDKELSEFIERQLVETRQTTKVVKDLFENYYTDSKIVTVKAGLVSELRRDFEVLKCREINDLNHAHDAFLNIIVGDVWSKKFTSNPYNFVKKNREKYTLNNIFTKNQKDLRGNEIWNCAEGKKRIIKTLNKPSVLFSVENFEQTGQLFDQNIIGKQDYKEKTSYVPIKGDERLQDISKYGGYRGISGAYFFIVEHTEKNKRVKTIESLPIYMKSYVEENGLLDFCTNEMKLVDPKIIVKKLNYKSEIIVDGFKYLISGKTENRLSLETNEYLYWNHTQTTDIKKILNINEKIELEKYNGDIESERENIIKYIQIILEKFKLKPFIKRRNLPNIEINFADYETEKLLQLLVNLIPLTTKYVSPVDLTVISGSKYAGKVLIPKKISNLNEVIFISKSITGIYESRRRII

SEQ ID NO: 988 - protein, 1023 aa, Helicobacter cinaedi
MKIYSFDIGVASIGWAFIENEVLQDCGIRIFTKAENPKNGASLALPRREARGVRKRLARRRGRLNTIKQLLCKEFGLQLEDYLSNDGELPKAYTASKANPLKSPYELRTLALSQKLDSKDLVRVILHIAKHRGYGNKHAKDSKDTESGKVKKAIEFNRKTLAEKGYRSVGEYLYREFFQQSRISQNNGATEFINVRNKAGNYEHCVAQDMLKEELESILNAQRQFGFSLKQDFENKLLTKIFEQRPLKSFADKVGNCCFIAGEKRTPKDSLSAIEFIALSRTINTLINLSKESGEIYNRAIILQIVESTLKKGEISYKELREIIRLDERLRFKDPRLDYSREIKEAEKVKFLEFKQLKGFKKALGESFTTLARSQLDEIAEHIALIKDRVKLNEKLESYALTKEQREALSNLSFSAHINLSLQALKQILPFMRGDNGEQCLDYDESVEKAGLKALSKDTLKGQMLPPLNEFEPYLSNPVVARALAEYRKVLNALLKQYGSPHKIHIEYAREAKLSSTERQKYEKEQKDNYAANQAAHKKCQELGLEPSSTNLLKLKLWQEQGGLCLYSGAKITISYLQDPTALQVDHIYPYSRSFDDSYMNKCLVLTKANQEKGNRTPFEAFGTDSAKWGVITTLAQKLPHKKRRRILNTAFNDKEAGFKLRNLNDTSYIARLVADYTETYLEFLPLVESENTTLGKGQKGSKKHIAIVNGALTSTMRYYLGFASKDRDNHLHHALDAVIIGFMNDSVIKAFSDFKKTQETSKAAYYAHTLSKQEYKKQRAFIQLPSGENFRASVLEKVESVFVSKPPRKRVRGALHEATFYSPNDPKLLKNYGGTKGVERALALGKMRKVGAKIVSNGAMVRVDIFRHKSSGKFYGVPVYTMDFALGILPNKAVVVGKDKNGVIKDWLEMDSSYEFIFSLYKDDLLLVQKKEMAEPELCYFMSFNSSIAQISVAKHDNNFSTLTKNQKLLFSNATQEDVSGKSIGIQNLQVFEKWQVSVLGEVKRTQSYPRENISLASKAKK

SEQ ID NO: 989 - protein, 1023 aa, Helicobacter cinaedi
MKIYSFDIGVASIGWAFIENEVLQDCGIRIFTKAENPKNGASLALPRREARGVRKRLARRRGRLNTIKQLLCKEFGLQLEDYLSNDGELPKAYTASKANPLKSPYELRTLALSQKLDSKDLVRVILHIAKHRGYGNKHAKDSKDTESGKVKKAIEFNRKTLAEKGYRSVGEYLYREFFQQSRISQNNGATEFINVRNKAGNYEHCVAQDMLKEELESILNAQRQFGFSLKQDFESKLLTKIFEQRPLKSFADKVGNCCFIAGEKRAPKDSPSAIEFIALSRTINTLINLSKESGEIYNRAIILQIVESTLKKGEISYKELREIIRLDERLRFKDPRLDYSREIKEAEKVKFLEFKQLKGFKKALGESFTTLAISQLDEIAEHIALIKDRVKLNEKLESYALTKEQREALSNLSFSAHINLSLQALKQILPFMRGDNGEQCLDYDESVEKAGLKALSKDTLKGQMLPPLNEFEPYLSNPVVARALAEYRKVLNVLLKQYGSPHKIHIEYAREAKLSSTERQKYEKEQKDNYAANQAAHKKCQELGLEPSSTNLLKLKLWQEQGGLCLYSGAKITISYLQDPTALQVDHIYPYSRSFDDSYMNKCLVLTKANQEKGNRTPFEAFGTDSAKWGVITTLAQKLPHKKRRRILNTAFNDKEAGFKLRNLNDTSYIARLVADYTETYLEFLPLVESENTTLSKGQKGSKKHIAIVNGVLTSTMRYYLGFASKDRDNHLHHALDAVIIGFMNDSVIKAFSDFKKTQETSKAAYYAHTLSKQEYKKQRAFIQLPSGENFRVSVLEKVESVFVSKPPRKRVRGALHEATFYSPNDPKLLKNYGGTKGVERALALGKMRKVGAKIVSNGAMVRVDIFRHKSSGKFYGVPVYTMDFALGILPNKAVVVGKDQNGVIKDWLEMDSSYEFIFSLYKDDVILVQKKEMQRPELCYFVSFDTSGASIKVAKHDNNFSTLTENQKLLFSNATKEEVVGKSIGIQNLKVFEKWQVSVLGEVKRTQSYPRENISLASKAKK

SEQ ID NO: 990 - protein, 344 aa, Helicobacter pullorum
MKILGFDIGIASIGWAFVENGELKDCGVRIFTKAENPKTGDSLAMPRREARSVRRRLARRKGRLETLKRLLAKEWDLCYEDYIAADGELPKAFMGKNLTNPYVLRYEALQRLLSKEELVRVVLHIAKHRGYGNKNAKITKSEESKREQGKILSALATNASVIARYRTVGEYFYKEFCEVIKNPQGLNTNENCTQPKVRVLKPIRNKGGEYTNCILQEDLQRELRCIFEHQKGFGFSITQEFQDKILKIAFYQRSLKDFSHLVGKCTFYPDEPRAPKFSLSAIEFITKAKAINLLASIAKESGEVWDKEQWRERLDSVFSAVCERGINTIPSSSHFLNIFDILYL

SEQ ID NO: 991 - protein, 1688 aa, Ignavibacterium album
MEFKKVLGLDIGTNSIGCALLSLPKSIQDYGKGGRLEWLTSRVIPLDADYMKAFIDGKNGLPQVITPAGKRRQKRGSRRLKHRYKLRRSRLIRVFKTLNWLPEDFPLDNPKRIKETISTEGKFSFRISDYVPISDESYREFYREFGYPENEIEQVIEEINFRRKTKGKNKNPMIKLLPEDWVVYYLRKKALIKPTTKEELIRIIYLFNQRRGFKSSRKDLTETAILDYDEFAKRLAEKEKYSAENYETKFVSITKVKEVVELKTDGRKGKKRFKVILEDSRIEPYEIERKEKPDWEGKEYTFLVTQKLEKGKFKQNKPDLPKEEDWALCTTALDNRMGSKHPGEFFFDELLKAFKEKRGYKIRQYPVNRWRYKKELEFIWTKQCQLNPELNNLNINKEILRKLATVLYPSQSKFFGPKIKEFENSDVLHIISEDIIYYQRDLKSQKSLISECRYEKRKGIDGEIYGLKCIPKSSPLYQEFRIWQDIHNIKVIRKESEVNGKKKINIDETQLYINENIKEKLFELFNSKDSLSEKDILELISLNIINSGIKISKKEEETTHRINLFANRKELKGNETKSRYRKVFKKLGFDGEYILNHPSKLNRLWHSDYSNDYADKEKTEKSILSSLGWKNRNGKWEKSKNYDVFNLPLEVAKAIANLPPLKKEYGSYSALAIRKMLVVMRDGKYWQHPDQIAKDQENTSLMLFDKNLIQLTNNQRKVLNKYLLTLAEVQKRSTLIKQKLNEIEHNPYKLELVSDQDLEKQVLKSFLEKKNESDYLKGLKTYQAGYLIYGKHSEKDVPIVNSPDELGEYIRKKLPNNSLRNPIVEQVIRETIFIVRDVWKSFGIIDEIHIELGRELKNNSEERKKTSESQEKNFQEKERARKLLKELLNSSNFEHYDENGNKIFSSFTVNPNPDSPLDIEKFRIWKNQSGLTDEELNKKLKDEKIPTEIEVKKYILWLTQKCRSPYTGKIIPLSKLFDSNVYEIEHIIPRSKMKNDSTNNLVICELGVNKAKGDRLAANFISESNGKCKFGEVEYTLLKYGDYLQYCKDTFKYQKAKYKNLLATEPPEDFIERQINDTRYIGRKLAELLTPVVKDSKNIIFTIGSITSELKITWGLNGVWKDILRPRFKRLESIINKKLIFQDEDDPNKYHFDLSINPQLDKEGLKRLDHRHHALDATIIAATTREHVRYLNSLNAADNDEEKREYFLSLCNHKIRDFKLPWENFTSEVKSKLLSCVVSYKESKPILSDPFNKYLKWEYKNGKWQKVFAIQIKNDRWKAVRRSMFKEPIGTVWIKKIKEVSLKEAIKIQAIWEEVKNDPVRKKKEKYIYDDYAQKVIAKIVQELGLSSSMRKQDDEKLNKFINEAKVSAGVNKNLNTTNKTIYNLEGRFYEKIKVAEYVLYKAKRMPLNKKEYIEKLSLQKMFNDLPNFILEKSILDNYPEILKELESDNKYIIEPHKKNNPVNRLLLEHILEYHNNPKEAFSTEGLEKLNKKAINKIGKPIKYITRLDGDINEEEIFRGAVFETDKGSNVYFVMYENNQTKDREFLKPNPSISVLKAIEHKNKIDFFAPNRLGFSRIILSPGDLVYVPTNDQYVLIKDNSSNETIINWDDNEFISNRIYQVKKFTGNSCYFLKNDIASLILSYSASNGVGEFGSQNISEYSVDDPPIRIKDVCIKIRVDRLGNVRPL

SEQ ID NO: 992 - protein, 1354 aa, Indibacter alkaliphilus
MKKILGLDLGTTSIGWAFIKEPEKDVVGSEIVDMGVRIVPLSSDEENDFAKGNTISINADRTLKRGARRNLQRFKQRRNALLETFKEKNLIPSNFQYAEDGPSSTFSTLKLRDKAAKEKIELDDFVKVLLQINKKRGYKSSRKAMSEEDEGTAIDSMGIAKELYENDLTPGQWVYEALKNGRKNVPDFYRSDLQEEFKKIVNYQSEFYPDILNTSFVEDWMGKASTPTKQYFNKRGVQLAENKGKREERRLQEYKWRAEAVNFKIDLSEIALILSQINSQISNSSGYLGAISDRSKELYFKNLTVGQYLYQQVKKNPHTRLKGQVFYRQDYLDEFEKIWSVQSSFYPQLNDELKQEVRDVTIFFQRRLKSQKHLISNCEFEEHHKVVPKSHPIFQEFRIWQNLNNLTLIKKDNLNEKCELALEDKTALANELAFKKELSVKDALKVLGLKPSDWEFNFTKIEGNRTNHAFFEAFAKIIELEDGEPIDLGNLKADDILDQFSEAFLRIGIDTELLQVNSDIEGAEYEKQSYIQFWHLLYSSEDDQKLKQNLIRKFGFKPEHAKILASISLQDDHASLSSRAIKKILPHLQSGLIYDKACTYAGYNHSSSFTKDENEKRELRAELELLKKNSLRNPVVEKILNQMINVVNAILKDPNLGRPDEIRVEMARELKANAEQRKNMTSNIASATRDHEKYREILKKEFGLKRVTKNDLLRYKLWLETDGISLYTGKPIEASKLFSKEYDIEHIIPKARLFDDSFSNKTICERQLNIDKANVTAFSFLQNKLSADEFEQYQSRVKSLYGKLSKAKIQKLLMANDKIPEDFIARQLQETRYISKKAKEILFEITMRVSVTTGTITDKLREDWGLVEIMKELNWEKYDKLGLTYTIEGKHGERLNKIKDWNKRNDHRHHAMDALTVALTKPAYIQYLNNLNAKAIGNKKGTEIFAIEQKYLKRENGKLCFIPPIENIRAEAKKHLSKILVSYKAKNKVVTINKNKTKKKAGFNEQTALTPRGQLHKETVYGKSFHYSTKFEKIGASFDAQKINTVAKKEEREALLKRLAENGNDPKKAFTGKNSLNKMPIYLDLGKNIKLSEKVKTVVLEQNYTIRKNIDPDLKVDKVIDVGIKRILESRLEEFGGNAKLAFSNLEENPIWLNKEKGIPIKRVKISGVSNVESLHVKKDHFGEKILDEEGNEIPVDFVSTGNNHHVAIYEDEDGNLQDEVVNFYEAVIRRNQGESIIKYRHEEGWNFLYSIKQNEFFVFPSQDFNPNDFDLLDPKNYDLISPNLYRAQKFSKVMYGNSAVRDYVFRHHLETVLNDVKELKDVAYKQLKSLQYLNGIKKVRLNHLGQIIQVGEY

SEQ ID NO: 993 - protein, 1397 aa, Joostella marina
MKKVLGLDLGTNSIGWALVNEATKEEKKEGKSSEIIKLGVRVNPLTVDEKTNFEKGRPLSTNADRTLKRSARRNLQRYKLRRRNLIEILIKNGFITKDTPLTETGKDTTHQTLKLRAKSAKEKVDLKDFAKILLTINKKRGYKSSRKVNSDEDGLAIDGMAVAKHLYEQNLTPGQYVLNLLQKNKKYVPDFYRSDLQEEFKNIWNNQKTYYFDILTDTLFEELKDKNKSQTWAICKKPFDIAGIKQIGKASDKRLERYKWRTEGLTQKLNLEYLAIALQEINNDINKSSGYLGAISDRSKELFFNKETVGENLYRQLVKTPHTSLRNQVFYRQDYLDEFETIWETQAKFYPQLTHTLKEEIRDVIIFYQRKLKSQKSLISFCQFESWEQTYIEKETGKSKTRTVGRKVIPKSSPLFQEFKIWQNLNSLEFRNSDEGEIIEFIKLDEDIRQTVFEELNLRGNLKPNDVLKILGNYISLGKVSQWKCNFEEIEGNRTNAALYNVYQIIAENEGYGFDWAKKTASEINKELKNIFPQLGIDASILDFDFTQANFDKQTSYQLWHLLYSAEEDFKISEEDKVLYGNSSVSLKKKLHQKYGFKPEYTKLLTNISLQPDYGNLSAKAICNILPYLKENNVYSEACDLTGYNHSNFLTAEEQAKRPLKPILELLKKNSLRNPVVEKILNQMVNVVNQVIETYGKPDEIRIELTRELKKSAKERANMTKSIADATRRNDDYRKTIIKEFGIPNPTKSDVVRYRLWQELASRGYKDIFTDTEIKPQELFSNKIDIEHIIPKALLFDDSFSNKTLAFKKDNLKKANRTAYDFIANDYAPNLENYIERVESLHKDRKITRAKRNKLLMLQSKLPDGFIERDLRNSQYITKEAKKMLYEVCRTVVSTSGSITDKLREDWDLINVMKELNFPKYKALGLTEKIERYDIGAEKMKEVEIIEDWNKRNDHRHHAIDALTVAFSTHSHIQYLNHLNARRDEGHKKHAAIIAIESTITEKEGNKKRRFIAPLPNFRLQAKEHIESILVSFKNKNKVVTNNINKTKRIKKDKFNTKVQLTPRGQLHKETIYGKIKQPLEKHIKLNKSFTLEQAKLIIDKRQREKVLNHLEKYAHNSDIAFNSKTLKKNPLLISDEPLKEVLCFEEVFTIRKDISYDNFKNEKQLDKVIDEKVKQALKERINQYNGDFREAFSDIERNPIWLNKAKGICVKRATIKGVSNAEPLHTAKNHLGEEVLTENKEQIPVDYVSTGNNHHVAIYEDEDGNLQEKVVSFYEAVIRVNEGLPIIDKEYNKSLGWTFKFTMKQNEMFVFPSEDFNPTEIDLLDQKNASLISPNLFRVQKFTIKDYFFRHHLETTVENNNTLKNTTWRREGLSGIYGIIKIRLNHLGEIVQVGEY

SEQ ID NO: 994 - protein, 1060 aa, Kingella kingae
MAAKSLNYILGLDLGIASCGWAVVEMDEQENPLRLIDVGVRTFEEAENPKDGSSLAETRRLARAQRRLISRRANRMNKLCRLLKQENVLQANDYDEKGLIIGLPNQAWELRAQGLDRKLEPKEWAAVLIHLVKHRGYLSQRKNESQTADKELGALLSGMNHNHQLLQSQSNQYRTPAELAIKQFATQDGHIRNQRGAYTHTFNRLDLQNELNQLFDAQTRLGNPHVSGSLKTAINDLLMNQKAALSGDAILEMLGRCTFEPSEYKAAKNTYSAERFVWLGKLTNLRIQDNGLESALSREQRELLLNEPYNKTKLTYQQVRKLLRLPETAFFKGLRYGKDNAESATFMEMKSYHAIRKSLENKSLKSEWEKLKTQPKLLDLIGTAFSIYKTDDEIAGCLKNQLPENVIIALQGQLNFSNFMELSLKALEKLLPLMEQGLRYDEACTQIYGNRHEKIADKTEKFLPNIPADKLRNPVVLRTLTQARKVINAIIRRYGSPARVHIETGREVGKSFSDRDKLKKQQEENQEQRRRAIDEWKQFFPNAAHEPKAVDILKLRLYQLQQGKCLYSGLPIDVRRLPEKGYVEIDHALPFSRTWDDSFNNKILVLASENQNKGNQTPYEYLRGADNSESWRLFVENVQNCQFSPNKKQKIMAKQLDEKGFLERNLNDTRYVSRFLCQFISEHLHLTGKGKKRVFASNGQITALLRGRWGLSKNREENDRHHAVDAVVVACSTVAMQQKITQFVRYQKGNVFTGERIDKETGEVISIHFPTPWEHFREEVMIRVFDDNPLRTLPEKLPNRPEALHEYVMPLFVSRMPTRKMTGQGHKETIKSAKRLDEKISVLRVPLTQLKLNDLENMVNREREPALYEALKARLEQFKNDPAKAFAEPFFKQGGQQVKAVRVEIVQKSGMLLRKINGVADNGSMVRVDVFEKSGKFYLVPIYAWQVAEGILPNYAVVAHKDESDWILMDESYHFKFALYKNDLLEVQTKKGGIMGYFASLDRATGAITIREHDRDKKKCKDGEHRSIGVKMASSFKKLQVDELGKNIHETRSRKRPNIG

SEQ ID NO: 995 - protein, 1314 aa, Lactobacillus animalis
MLKKDYSIGLDIGTNSVGHAVVTDDYKVPTKKMKVFGDTSKKTIKKNMLGVLLFNEGQTAADTRLKRGTRRRYTRRKNRLRYLQEIFAPELAKVDPNFLYRLEESSLVAEDKKYDVYPIFGKREEELLYHDTYKTIYHLRSALANNDQPADLRLVYLALAHIIKYRGNFLLEGEIDLRTTDINKVFAEFSETLNENSDENLGKLDVADIFKNNTFSKTKKSEELLKLSGAKKNQLAHQLFKMMVGNMGSFKKVLGTDEEHKLSFGKDTYEDDLNDLLAEAGDQYLDIFVAAKKVYDAAILASILDVKDTQTKTVFSQAMIERYEEHQKDLIELKRVFKKYLPEKCHDFFSEPKISGYAGYIDGKVSEEDFYKYTKKTLKGIPETEEILQKIDANNYLRKQRTFDNGAIPHQVHLKELVAIVENQGKYYPFLRENKDKFEKILNFRIPYYVGPLARGNSKFAWLTRAGEGKITPYNFDEMIDKETSAEDFIKHMTINDLYLPTEPVLPKHSLLYERYTIFNELAGVRYVTENGEAKYFDAQTKRSIFELFKLDRKVSEKMVIKHLKVVMPAIRIQALKGLDNGKFNASYGTYKDLVDMGVAPELLNDEVNSEKWEDIIKTLTIFEGRKLIKRRLENYRDFLGEDILRKLSRKKYTGWGRLSAKLLDGIYDKKTHKTILDCLMTEDYSQNFMQLINDDNYSFKETIKNAQVIEKEETLAKTVQELPGSPAIKKGILQSLEIVDEIIKVMGYKPKSIVVEMARETQKTHGTRKREDRVQQIVENLKDANELPEKLPSNAELSDERKYLYCLQNGRDMYTGAPLDYDHLQFYDVDHIIPQSFLKDDSIENKVLTIKKENVRKTNGLPSEAVIQKMGSFWKKLLDAGAMTNKKYDNLRRNLHGGLNEKLKERFIERQLVETRQITKYVAQLLDQRLNYDGNGVELDEKIAIVTLKAQLASQFRSEFKLRKVRALNNLHHAHDAYLNAIVANLIMAKYPELEPEFVYGKYRKAKFKGLGKATAKNTLYANVLYFLKENEVYPFWDKARDLPTIKRYLYRAQVNKVRKAERQIGGFSDEMLVPKSDSGKLLPRKEGLDPVKYGGYAKAVESYAVLITADEVKKGKTKKVKTLVNIPIIDSKKYEADPTAYLASRGYTNVTNSFILPKYSLLEDPEGRRRYLASFKEFQKANELILPQHLVELLYWVNAKDGEQKLEDHKAEFKELFDKIMEFADKYVVAPKNSEKIRRLYEENQDATPMELGKNFVELLRYTADGAASDFKFFGENIPRKRYNSAGSLLNGTLIYQSKTGLYETRIDLGKL

SEQ ID NO: 996 - protein, 1371 aa, Lactobacillus buchneri
MKVNNYHIGLDIGTSSIGWVAIGKDGKPLRVKGKTAIGARLFQEGNPAADRRMFRTTRRRLSRRKWRLKLLEEIFDPYITPVDSTFFARLKQSNLSPKDSRKEFKGSMLFPDLTDMQYHKNYPTIYHLRHALMTQDKKFDIRMVYLAIHHIVKYRGNFLNSTPVDSFKASKVDFVDQFKKLNELYAAINPEESFKINLANSEDIGHQFLDPSIRKFDKKKQIPKIVPVMMNDKVTDRLNGKIASEIIHAILGYKAKLDVVLQCTPVDSKPWALKFDDEDIDAKLEKILPEMDENQQSIVAILQNLYSQVTLNQIVPNGMSLSESMIEKYNDHHDHLKLYKKLIDQLADPKKKAVLKKAYSQYVGDDGKVIEQAEFWSSVKKNLDDSELSKQIMDLIDAEKFMPKQRTSQNGVIPHQLHQRELDEIIEHQSKYYPWLVEINPNKHDLHLAKYKIEQLVAFRVPYYVGPMITPKDQAESAETVFSWMERKGTETGQITPWNFDEKVDRKASANRFIKRMTTKDTYLIGEDVLPDESLLYEKFKVLNELNMVRVNGKLLKVADKQAIFQDLFENYKHVSVKKLQNYIKAKTGLPSDPEISGLSDPEHFNNSLGTYNDFKKLFGSKVDEPDLQDDFEKIVEWSTVFEDKKILREKLNEITWLSDQQKDVLESSRYQGWGRLSKKLLTGIVNDQGERIIDKLWNTNKNFMQIQSDDDFAKRIHEANADQMQAVDVEDVLADAYTSPQNKKAIRQVVKVVDDIQKAMGGVAPKYISIEFTRSEDRNPRRTISRQRQLENTLKDTAKSLAKSINPELLSELDNAAKSKKGLTDRLYLYFTQLGKDIYTGEPINIDELNKYDIDHILPQAFIKDNSLDNRVLVLTAVNNGKSDNVPLRMFGAKMGHFWKQLAEAGLISKRKLKNLQTDPDTISKYAMHGFIRRQLVETSQVIKLVANILGDKYRNDDTKIIEITARMNHQMRDEFGFIKNREINDYHHAFDAYLTAFLGRYLYHRYIKLRPYFVYGDFKKFREDKVTMRNFNFLHDLTDDTQEKIADAETGEVIWDRENSIQQLKDVYHYKFMLISHEVYTLRGAMFNQTVYPASDAGKRKLIPVKADRPVNVYGGYSGSADAYMAIVRIHNKKGDKYRVVGVPMRALDRLDAAKNVSDADFDRALKDVLAPQLTKTKKSRKTGEITQVIEDFEIVLGKVMYRQLMIDGDKKFMLGSSTYQYNAKQLVLSDQSVKTLASKGRLDPLQESMDYNNVYTEILDKVNQYFSLYDMNKFRHKLNLGFSKFISFPNHNVLDGNTKVSSGKREILQEILNGLHANPTFGNLKDVGITTPFGQLQQPNGILLSDETKIRYQSPTGLFERTVSLKDL

SEQ ID NO: 997 - protein, 315 aa, Lactobacillus casei
MFKDYLKQLEDDGTAKAIRQLYDRYIDGDDAKPFVREDFVKALTKEVTAHPNAKSPELLERLAQPDFMLKQRNKANGAIPVQMQQRELDQIIKNQSVYYDWLAAPNPVEKHRKSMPYQLDELLNFRIPYYVGPLVTAKEQKAARGGVFAWMVRKDPDGNITPYNFDEKVDREASANTFIQRMKTTDTYLIGEDVLPKQSLLYQSYEVLNELNNVRVNDNKLSFDQKQQVLGELFERHNTVTIKQFVDNLLAHGDYDRIPEVRGLADEKRFLSSLSTYNQLKGILHEAIDDSDKQTDMVDCKINPNAVRTKKISFL

SEQ ID NO: 998 - protein, 236 aa, Lactobacillus casei
MFKDYLKQLEDDGTAKAIRQLYDRYIDGDDAKPFVREDFVKALTKEVTAHPNAKSPELLERLAQPDFMLKQRNKANGAIPVQMQQRELDQIIKNQSVYYDWLAAPNPVEKHRKSMPYQLDELLNFRIPYYVGPLVTAKEQKAARGGVFAWMVRKDPDGNITPYNFDEKVDREASANTFIQRMKTTDTYLIGEDVLPKQSLLYQSYEVLNELNNVRVNDNKLSSSIFKSSATMITNS

SEQ ID NO: 999 - protein, 1389 aa, Lactobacillus casei
MIIRTYELKTITTIAILKMFQLLTGGLSMTKLGKPYGIGVDIGSNSIGFAAVDENSHLIRLKGKTVIGARLFEEGKAAADRRASRTTRRRLSRNRWRLSFLRDFFESHITPTGPNFFMRQKYSEISPKDKARYKYEKRLFNDRTDAEFYQQYPTMYHLRNRLLTDPSKADVREIYFAIHHILKSRGHFLTSGYAKDFNTNKVALNEIFPALQDAYAQVYPDLDITFDENKVNEFKTVLLNEKATPSDTQRALVNLLLAEDGDKDILKQQKQVLTEFAKAVVGLKTKLNVALGTEVDSSEATVWNFSLGQLDDKWAGIESAMTDEGTEILDQIRDLYRARLLNGIVPAGKTLSQAKVDDYAQHHEDLELFKDYLKQLEDDGTAKAIRQLYDRYIDGDDAKPFVREDFVKALTKEVTAHPNAKSPELLERLAQPDFMLKQRNKANGAIPVQMQQRELDQIIKNQSVYYDWLAAPNPVEKHRKSMPYQLDELLNFRIPYYVGPLVTAKEQKAAQGGVFAWMVRKDPDGNITPYNFDEKVDREASANTFIQRMKTTDTYLIGEDVLPKQSLLYQRYEVLNELNNVRVNNEKLSIEQKQQVIRELFERHNSVTIKQFAENLRAHGDYAHIPEIRGLADEKRFLSSLSTYRQLKSLLPDAIDDPAKQADIENIIAWSTVFEDAAIFKTKLKEINWLDSQTITKLSNIRYRGWGQFSHKFLNGLTLGNGHTIIQELFLSNNNLMQILTDETLQKKMTELNADKLKAANINDAIDDAYTSPSNKKALRQVLRVIEDIKRAADGQDPSWLYVETADGGGTPGKRTRARQHQLQEIYANAAHELIDSAVRGELEDKIADKADFNDRLVLYFMQGGRDIYTGTPLNIDQLSSYDIDHILPQSLIKDNSLDNRVLVHAIINREKNATFASTIYAQKMNATWRQWHEAGLISGRKLRNLQMRPDQIDKYASGFVARQLVETRQIIKLTEQIVAAQYPETKIIAVKAGLSHQLREELEFPKNRDVNHYHHAFDAFLAARIGTYLLKRFPNLQAFFTYGKFKKADVKKLRGFNFIRDITHAEDKIVVKDTGEVIWDKKRDVDELDRIYNFKRMLITHEVHFEKADLFKQTVYGAKDSKEAGGKKQLISKKKGYPVDIYGGYTQETGSYLSVVRLTKKAMYAVVKVSTRDAAKLAVAKSISEQKENETLNDIIDEKLSKISKNGKITHELFEVVLPRVGQKTLFKNSKYNLFLVNSDTYMHNYQELWMPREYQKMWKDISLSKYGDAQTEDQLDQIFGFIVSQVNSYFNLYDINQFRKKLNDAADKFATLPMRDTDDMQGKIATIGQLLIGLQANAARSDLRNLDIKTPLGLLQIPNGISLDSDTSVVYQSPTGLLEREVHLSDL

SEQ ID NO: 1000 - protein, 412 aa, Lactobacillus casei
MIKDNSLDNRVLVHPLVNREKDTIFASTRFAKQTNGMWRQWHAAGLISSRKLRNLQMRPDEIDKYASGFVARQLVETRQIIKLTEQIVADQYPDTKIIAVKAGLSSQLRKELDFPKNREVNHYHHAFDAFLAARIGTYLLKRYPNLEPFFTYGKFKKTEVKKLKSFNFIRDMTHAKDKIVAKETGEIVWDNASDINELDRIYNFKRMLITHEVRFETASLFKQTLYAAKNPKNRGGSRQLIPKKKGYLVDIYGGYTQETGSYLSVVRLTKKAMYAVVKVSTRDAAKLAVAKSISEQKENETLKKIIDGKLSKTSKKGKTTHQLFEIVLPRVGQKTLFKNSKYNQFLVNSDTYMHNYQELWMPREYQRMWKDILLSNHGDAQIEGQLDQIFKFIVSQVNSYFNLYDINQFRKK

SEQ ID NO: 1001 - protein, 234 aa, Lactobacillus casei
MKVTKKTETIFKVVKIATSQVAALNKARSRSTAEELSVLTELLKPKFSKVGKNGKITDTPFEVVLPRVPREQLFYNAKYGFFMVNSDTMFHNFQEIWVSRSDQKILQQIRKAKIDYPNVDQDLDNLFHNLADQIVKYFDLYSIAGFKEKISQSQNTFNDLAVDDTDQSVGKITVINELLKGAQANGMTGSLKVLKISTPFGFTQDKSGVLTKDSSIIYQSPTGLFERSVRLTDL

SEQ ID NO: 1002 - protein, 566 aa, Lactobacillus casei
MQILTDEVLKQKIAELNAHELKASGIYAAIDDAYTSPSNKKALRQVLSVIDDITNAAGQAPNWLYIETADGDGVPGKRTNSRQRKIQEIYVNAAQELITSSVRGELEDKIASRADFTDRLVLYFMQGGRDIYTGEPLNIDNLSSYDIDHILPQSLIKDNSLDNRVLVHPLVNREKDTIFASTRFAKQMNGMWRQWHAAGLISSRKLRNLQMRPDEIDKYASGFVARQLVETRQIIKLTEQIVADQYPDAKIIAVKAGLSSQLRKELDFPKNREVNHYHHAFDAFLAARIGTYLLKRYPNLEPFFTYGKFKKTEVKKLKSFNFIRDMTHAKDKIVAKETGEIVWDNASDINELDRIYNFKRMLITHEVRFETASLFKQTLYAAKNSKNRGGSRQLIPKKKGYLVDIYGGYTQETGSYLSVVRLTKKAMYAVVKVSTRDAAKLAVAKSISEQKENETLKKIIDGKLSKTSKKGKTTHQLFEIVLPRVGQKTLFKNSKYNQFLVNSDTYMHNYQELWMPREYQRMWKDILLSNHGDAQLEGQLDQIFKFIVSQVNSYFNLYDINQFRKK

SEQ ID NO: 1003 - protein, 1363 aa, Lactobacillus casei
MTKLGKPYGIGVDIGSNSIGFAAVDENSHLIRLKGKTVIGARLFEEGKAAADRRASRTTRRRLSRNRWRLSFLRDFFESHITPTDPNFFMRQKYSEISPKDKARYKYEKRLFNDRTDAEFYQQYPTMYHLRNRLLTDPSKADVREIYFAIHHILKSRGHFLTSGYAKDFNTNKVALNEIFPALQDAYAQVYPDLDITFDENKVNEFKTVLLDEKATPSDTQRALVNLLLAEDGDKDILKQQKQVLTEFAKAVVGLKMKLNVALGTEVDSSEATAWNFSLGQLDDKWAGIESAMTDEGTEILDQIRDLYRARLLNGIVPAGKTLSQAKVDDYEQHHEDLELFKDYLKQLEDDGMAKVIRQLYDRYIDGDDAKPFVREDFVKALTKEVTAHPNAKSPELLERLVQPDFMLKQRNKANGAIPVQMQQRELDQIIKNQSVYYDWLAAPNPVEKHRQSMPYQLDELLNFRIPYYVGPLVTAKEQKAAQGGVFAWMVRKDPDGNITPYNFDEKVDREASANTFIQRMKTTDTYLIGEDVLPKQSLLYQSYEVLNELNNVRVNDNKLSFDQKQQVLGELFERHNTVTIKQFVDNLLAHGDYDRIPEVRGLADEKRFLSSLSTYNQLKGILHEAIDDSDKQTDIEKIIAWSTIFEDKAIFKTKLNEISWLTAGMINSLANIRYRGWGQFSHKLLNELTLSTGRTVFEELLISSHNLMQILTDEVLKQKIAELNAHELKASGIYAAIDDAYTSPSNKKALRQVLSVIDDITNAAGQAPNWLYIETADGDGVPGKRTNSRQRKIQEIYANAAQELITGSVRGELEDKIASRADFTDRLVLYFMQGGRDIYTGEPLNIDNLSSYDIDHILPQSLIKDNSLDNRVLVHPLVNREKDTIFASTRFAKQMNGMWRQWHAAGLISSRKLRNLQMRPDEIDKYASGFVARQLVETRQIIKLTEQIVADQYPDAKIIAVKAGLSSQLRKELDFPKNREVNHYHHAFDAFLAARIGTYLLKRYPNLEPFFTYGKFKKTEVKKLKSLKSFNFIRDMTHAKDKIVAKETGEIVWDNASDINELDRIYNFKRMLITHEVRFETASLFKQTLYAAKNSKNRGGSRQLIPKKKGYLVDIYGGYTQETGSYLSVVRLTKKAMYAVVKVSTRDAAKLAVAKSISEQKENETLKKIIDGKLSKTSKKGKTTHQLFEIVLPRVGQKTLFKNSKYNQFLVNSDTYMHNYQELWMPREYQRMWKDILLSNHGDAQLEGQLDQIFKFIVSQVNSYFNLYDINQFRKKIADATDKFAKLPTHDTDNARGKIATIGQLLIGLQANAMRSDLRNLDIKTPFGLLQIGTGITLDLDTSIIYQSPTGLFEREVPLTDL

SEQ ID NO: 1004 - protein, 1360 aa, Lactobacillus casei
MTKLGKPYGIGVDIGSNSIGFAAVDENSHLIRLKGKTVIGARLFEEGKAAADRRASRTTRRRLSRNRWRLSFLRDFFESHITPTDPNFFMRQKYSEISPKDKARYKYEKRLFNDRTDAEFYQQYPTMYHLRTRLLTDPSKADVREIYFAIHHILKSRGHFLTPGYAKDFNTNKVALNEIFPALQDAYAQVYPDLDITFDENKVNEFKTVLLNEKATPSDTQRALVNLLLAEDGDKDILKQQKQVLTEFAKAVVGLKTKLNVALGTEVDSSEATVWNFSLGQLDDKWAGIESAMTDEGTEILDQIRDLYRARLLNGIVPAGKTLSQAKVDDYAQHHEDLELFKDYLKQLEDDGTAKAIRQLYDRYIDGDDAKPFVREDFVKALTKEVTAHPNAKSPELLERLAQPDFMLKQRNKANGAIPVQMQQRELDQIIKNQSVYYDWLAAPNPVEKHRKSMPYQLDELLNFRIPYYVGPLVTAKEQKAAQGGVFAWMVRKDPDGNITPYNFDEKVDREASANTFIQRMKTTDTYLIGEDVLPKQSLLYQSYEVLNELNNVRVNDNKLSFDQKQQVLGELFERHNTVTIKQFVDNLLAHGDYDRIPEVRGLADEKRFLSSLSTYNQLKGILHEAIDDADKQTDIENIIAWSTIFEDKAIFKTKLNEISWLNAGMINSLANIRYRGWGQFSHKLLNELTLSTGRTVFEELLISSRNLMQILTDEVLKQKIAELNAHELKASGIYAAIDDAYTSPSNKKALRQVLSVIDDITNAAGQAPNWLYIETADGDGVPGKRTNSRQRKIQEIYANAAQELITGSVRGELEDKIASRADFTDRLVLYFMQGGRDIYTGEPLNIDNLSSYDIDHILPQSLIKDNSLDNRVLVHPLVNREKDTIFASTRFAKQMNGMWRQWHAAGLISSRKLRNLQMRPDEIDKYASGFVARQLVETRQIIKLTEQIVADQYPDTKIIAVKAGLSSQLRKELDFPKNREVNHYHHAFDAFLAARIGTYLLKRYPNLEPFFTYGKFKKTEVKKLKSFNFIRDMTHAKDKIVAKETGEIVWDNASDINELDRIYNFKRMLITHEVRFETASLFKQTLYAAKNSKNRGGSRQLIPKKKGYLVDIYGGYTQETGSYLSVVRLTKKAMYAVVKVSTRDAAKLAVAKSISEQKENETLKKIIDGKLSKTSKKGKTTHQLFEIVLPRVGQKTLFKNSKYNQFLVNSDTYMHNYQELWMPREYQRMWKDILLSNHGDAQLEGQLDQIFKFIVSQVNSYFNLYDINQFRKKIADATDKFAKLPTHDTDNARGKIATIGQLLIGLQANAMRSDLRNLDIKTPFGLLQIGTGITLDLDTSIIYQSPTGLFEREVPLTDL

SEQ ID NO: 1005 - protein, 700 aa, Lactobacillus casei
MTKLGKPYGIGVDIGSNSIGFAAVDENSHLIRLKGKTVIGARLFEEGKAAADRRASRTTRRRLSRNRWRLSFLRDFFESHITPTDPNFFMRQKYSEISPKDKARYKYEKRLFNDRTDAEFYQQYPTMYHLRTRLLTDPSKADVREIYFAIHHILKSRGHFLTSGYAKDFNTNKVALNEIFPALQDAYAQVYPDLDITFDENKVNEFKTVLLDEKATPSDTQRALVNLLLAEDGDKDILKQQKQVLTEFAKAVVGLKTKLNVALGTEVDSSEATAWNFSLGQLDDKWAGIESAMTDEGTEILDQIRDLYRARLLNGIVPAGKTLSQAKVDDYEQHHEDLELFKDYLKQLEDDGMAKAIRQLYDRYIDGDDAKPFVREDFVKALTKEVTAHPNAKSPELLERLVQPDFMLKQRNKANGAIPVQMQQRELDQIIKNQSVYYDWLAAPNPVEKHRQSMPYQLDELLNFRIPYYVGPLVTAKEQKAAQGGVFAWMVRKDPDGNITPYNFDEKVDREASANTFIQRMKTTDTYLIGEDVLPKQSLLYQSYEVLNELNNVRVNDNKLSFDQKQQVLGELFERHNTVTIKQFVDNLLAHGDYDRIPEVRGLADEKRFLSSLSTYNQLKGILHEAIDDSDKQTDIEKIIAWSTIFEDKAIFKTKLNEISWLNAGMINSLANIRYRGWGQFSHKLLNELTLSTGRTVFEA

SEQ ID NO: 1006 - protein, 330 aa, Lactobacillus casei
MTKLGKPYGIGVDIGSNSIGFAAVDENSHLIRLKGKTVIGARLFEEGKAAADRRASRTTRRRLSRNRWRLSFLRDFFESHITPTDPNFFMRQKYSEISPKDKNRYKYEKRLFNDRTDAEFYQQYPTMYHLRNRLLTDPSKADVREIYFAIHHILKSRGHFLTPGDAKDFNTNKVALNEIFPALQDAYAQVYPDLDITFDENKMNEFKTVLLNEKATPSDTQRALVNLLLAEDGDKDILKQQKQVLTEFAKAVVGLKTKLNVALGTEVDSSEATAWNFSLGQLDDKWAGIESAMTDEGTEILDQIRDLYRARLLNGIVPAGKTLSQAKVDD

SEQ ID NO: 1007 - protein, 330 aa, Lactobacillus casei
MTKLGKPYGIGVDIGSNSIGFAAVDENSHLIRLKGKTVIGARLFEEGKAAADRRASRTTRRRLSRNRWRLSFLRDFFESHITPTDPNFFMRQKYSEISPKDKNRYKYEKRLFNDRTDAEFYQQYPTMYHLRNRLLTDPSKADVREIYFAIHHILKSRGHFLTPGDAKDFNTNKVALNEIFPALQDAYAQVYPDLDITFDENKMNEFKTVLLNEKATPSDTQRALVNLLLAEDGDKDILKQQKQVLTEFAKAVVGLKTKLNVALGTEVDSSEATAWNFSLGQLDDKWAGIESAMTDEGTEILDQIRDLYRARLLNGIVPAGKTLSHAKVDD

SEQ ID NO: 1008 - protein, 1361 aa, Lactobacillus casei
MTKLGKPYGIGVDIGSNSIGFAAVDENSHLIRLKGKTVIGARLFEEGKAAADRRASRTTRRRLSRNRWRLSFLRDFFESHITPTGPNFFMRQKYSEISPKDKARYKYEKRLFNDRTDAEFYQQYPTMYHLRNRLLTDPSKADVREIYFAIHHILKSRGHFLTSGYAKDFNTNKVALNEIFPALQDAYAQVYPDLDITFDENKVNEFKTVLLNEKATPSDTQRALVNLLLAEDGDKDILKQQKQVLTEFAKAVVGLKTKLNVALGTEVDSSEATVWNFSLGQLDDKWAGIESAMTDEGTEILDQIRDLYRARLLNGIVPAGNTLSQAKVDDYAQHHEDLELFKDYLKQLEDDGTAKAIRQLYDRYIDGDDAKPFVREDFVKALTKEVTAHPNAKSPELLERLAQPDFMLKQRNKANGAIPVQMQQRELDQIIKNQSVYYDWLAAPNPVEKHRKSMPYQLDELLNFRIPYYVGPLVTAKEQKAAQGGVFAWMVRKDPDGNITPYNFDEKVDREASANTFIQRMKTTDTYLIGEDVLPKQSLLYQRYEVLNELNNVRVNNEKLSIEQKQQVIRELFERHNSVTIKQFAENLRAHGDYAHIPEIRGLADEKRFLSSLSTYRQLKSLLPDAIDDPAKQADIENIIAWSTVFEDAAIFKTKLKEINWLDSQTITKLSNIRYRGWGQFSHKFLNGLTLGNGHTIIQELFLSNNNLMQILTDETLQKKMTELNADKLKAANINDAIDDAYTSPSNKKALRQVLRVIEDIKRAADGQDPSWLYVETADGGGTPGKRTRARQHQLQEIYANAAHELIDSAVRGELEDKIADKADFNDRLVLYFMQGGRDIYTGTPLNIDQLSSYDIDHILPQSLIKDNSLDNRVLVHAIINREKNATFASTIYAQKMNATWRQWHEAGLISGRKLRNLQMRPDQIDKYASGFVARQLVETRQIIKLTEQIVAAQYPETKIIAVKAGLSHQLREELEFPKNRDVNHYHHAFDAFLAARIGTYLLKRFPNLQAFFTYGKFKKADVKKLRGFNFIRDITHAEDKIVVKDTGEVIWDKKRDVDELDRIYNFKRMLITHEVHFEKADLFKQTVYGAKDSKEAGGKKQLISKKKGYPVDIYGGYTQETGSYLSVVRLTKKAMYAVVKVSTRDAAKLAVAKSISEQKENETLNDIIDEKLSKISKNGKITHELFEVVLPRVGQKTLFKNSKYNLFLVNSDTYMHNYQELWMPREYQKMWKDISLSKYGDAQTEDQLDQIFGFIVSQVNSYFNLYDINQFRKKLNDAADKFATLPMRDTDDMQGKIATIGQLLIGLQANAARSDLRNLDIKTPLGLLQIPNGISLDSDTSVVYQSPTGLLEREVHLSDL

SEQ ID NO: 1009 - protein, 1128 aa, Lactobacillus casei
MTKLGKPYGIGVDIGSNSIGFAAVDENSHLIRLKGKTVIGARLFEEGKAAAKRRAGRTTRRRLSRNRWRLSFLRDFFESHITPTDPNFFMRQKYSEISPKDKARYKYEKRLFNDRTDAEFYQQYSTMYHLRNRLMTDPSRADVREIYFAIHHILKSRGHFLTPGDAKDFNTNDVALDEIFPALQDAYAQVYPDLGITFDEDKANEFKTILLNEIATSIDTQRALVKLLLAEEDDKDILKQQKQVLTEFAKAVVGLKTKLNLALGTEVDSSEATAWNFSLGQLDDKWAGIESAMTDEGTEILDQIRDLYRARLLNGIVPTGKTLSQAKVDDYTQHHEDLQLFKAYLKQLEDDGTAKAIRQLYDRYIDGDDAAPFLRENFVKALTKDVTAHPNTKSPELLERLAQPDFMLKQRNKANGAIPVQMQQRELDQIIKNQAVYYDWLAAPNPVEKHRKSMPYQLDELLNFRIPYYVGPLVTAKEQKAAQGGVFAWMVRKDPEGNITPYNFDEKVDREASANTFIQRMKTTDTYLIGEDVLPKQSLLYQRYEVLNELNNVRVNNEKLSIEQKQQVIRELFERHNSVTIKQFAENLRAHGDYAHIPEIRGLADEKRFLSSLSTYRQLKSLLPEAIDDPAKQADIENIIAWSTVFEDAAIFKTKLKEISWLGSEAITKLSNIRYRGWGQFSRKFLNGLTLGNGHTIIQELLLSTNNLMQILTDETLQKKMTELNADKLKTANINDAIDNAYTSPSNKKALRQVLRVVDDIKRAADGQDPSWLYVETADGGGTPGKRTRARQHQLQEIYANAAHELIDTAVRGELEDKISDKADFNDRLVLYFMQGGRDIYTGAPLNIDQLSSYDIDHILPQSLIKDNSLDNRVLVHAIINREKNATFASTIYAQKMNATWRQWHEAGLISGRKLRNLQMRPDQIDKYASGFVARQLVETRQIIKLTEQIVAAQYPDTKIIAVKAGLSHQLREELEFPKNRDVNHYHHAFDAFLAARIGTYLLKRFPNLQAFFTYGKFTKADVKKLRGFNFIRDITHAEDKIVAKDTGEVVWDKQRDVDELDRIYNFKRMLITHEVRFETADLFKQTVYGARDSKEAGGSKQLIPKKKDIQLIFMGAISERTRPILPL

SEQ ID NO: 1010 - protein, 1366 aa, Lactobacillus casei
MTKLGKPYGIGVDIGSNSIGFAAVDENSHLIRLKGKTVIGARLFEEGKAAAYRRASRTTRRRLSRNRWRLSFLRDFFESHITPTDPNFFMRQKYSEISPKDKARYKYEKRLFNDRTDAEFYQQYPTMYHLRTRLLTDPSKADVREIYFAIHHILKSRGHFLTPGYAKDFNTNKVALNEIFPALQDAYAQVYPDLDITFDENKVNEFKTVLLNEKATPSDTQRALVNLLLAKEGDRDILKQQKQVLTEFAKAVVGLKTKLNVALGTEVDSSEATAWNFSLGQLDDKWAGIESAMTDEGTEILDQIRDLYRARLLNGIVPAGKTLSQAKVDDYAQHHEDLELFKDYLKQLEDDGTAKAIRQLYDRYIDGDDAKPFVREDFVKALTKEVTAHPNAKSPELLERLAQPDFMLKQRNKANGAIPVQMQQRELDQIIKNQAVYYDWLAAPNPVEKHRQSMTYQLDELLNFRIPYYVGPLVTAKEQKAAQGGVFAWMVRKDPDGNITPYNFDEKVDREASANTFIQRMKTTDTYLIGEDVLPKQSLLYQSYEVLNELNNVRVNDNKLSFDQKQQVLGELFERHNTVTIKQFVDNLLAHGDYDRIPEVRGLADEKRFLSSLSTYNQLKGILHEAIDDADKQTDIENIIAWSTIFEDKAIFKTKLNEISWLNAGMINSLANIRYRGWGQFSHKLLNELTLSTGRTVFEELLISSRNLMQILTDEVLKQKIAELNAHELKASGIYAAIDDAYTSPSNKKALRQVLSVIDDITNAAGQAPNWLYIETADGDGVPGKRTNSRQRKIQEIYANAAQELITGSVRGEFEDKIASRADFTDRLVLYFMQGGRDIYTGEPLNIDNLSSYDIDHILPQSLIKDNSLDNRVLVHPLVNREKDTIFASTRFAKQMNGMWRQWHAAGLISSRKLRNLQMRPDEIDKYASGFVARQLVETRQIIKLTEQIVADQYPDTKIIAVKAGLSSQLRKELDFPKNREVNHYHHAFDAFLAARIGTYLLKRYPNLEPFFTYGKFKKTEVKKLKSLKSLKSFNFIRDMTHAKDKIVAKETGEIVWDNASDINELDRIYNFKRMLITHEVRFETASLFKQTLYAAKNSKNRGGSRQLIPKKKGYLVDIYGGYTQETGSYLSVVRLTKKAMYAVVKVSTRDAAKLAVAKSISEQKENETLKKIIDGKLSKTSKKGKTTHQLFEIVLPRVGQKTLFKNSKYNQFLVNSDTYMHNYQELWMPREYQRMWKDILLSNHGDAQIEGQLDQIFKFIVSQVNSYFNLYDINQFRKKIADATDKFAKLPTHDTDNARGKIATIGQLLIGLQANAMRSDLRNLDIKTPFGLLQIGTGITLDLDTSIIYQSPTGLFEREVPLTDL

SEQ ID NO: 1011 - protein, 1354 aa, Lactobacillus coryniformis
MTLHYNVGLDIGTNSVGYTIVDDNGKILQVKGKNGYGVRVFKEGATAAERRIFRTTHRRLKRRKWRLRLLQDFFEPYILPQDDGFFIRRKESNLVLNDRDEDTASLFNDRSDRDFYQAYPTIYHLRQALMTEKRQFDVREIYLAMHHIIKYRGHFLLNGTVNNFTNNKIDLHSDFEELNALLLNVIPELKFQIDLDHSTMFQTTLLNTTISRSGRQRDLVKSFYNGSDDKQLAKQQKSVATELLKAILGLKAKFHKLFNLDLLETTEWEFSFDAEDIDDKLAKLEPLMTENQQQVMDILQRIFAAITLNGIVPEGKTLSASKVDSYQKHKQDLKLLKAIAQHSDKKTATVLQTAYNEYINGIASKPLKQEDFYKRLTNAVKKSSDPQVADMLALIDQEKFLPKQRTKENGAIPHQLHQLELERIIDNQKDYYPWLAELNPNQARQKVAKYKLSELVAFRVPYYVGPLIEPEVQQATSNAHFAWMARKEAGPITPWNFDQKVDRNVSAERFIKRMTTKDTYLLAEDVLPLHSLLYQRFIVLNELNNVRVNGQKLTKKQKQAVYQDLFKRQPHVTKKQFKSYLVQTGEFAESSKIEGLANETSFNSGLTTENELRKIFGAQLDEARYQVDFEQIIEWATLFEDAKILRTKLAEITWLTTEQIEKLAGIRYRGWGRFSRKLLAGLRDQNGQQIIDLLWDTPNNFMVIVSQAAFSEAITKENEKLIDRRGAQDVITDLYTSPQNKKALRQVLAIVADVQKAMGGVPPQRIFIEFAREDEKNPRRSVERSRQLEKLYQTISNEFLINSEVRQELKEAVDQKVNFKDRLFLYFLQGGVDLYSGKRINIDQLSHYDIDHILPQSFIKDDSLDNRVLVSQKLNRSKSDSVPLSEFANYKFGPAMQAKWLQLKEAGLLSKRKYDNLTLDPTKLSKFAPLGFVNRQLVETRQVIKLAANLLASEETKVVTIKANMTHQVRKELDFPKNRNVNNYHHAFDAYLTAFVGIFLSKRYPKLKPYFTYGDFQKGNKLPDLKNFNFLYELKNKDRSIDSNTGEIIWDKQRDLAYMNKIYNFKKVTVVHEVLTKSGALYNQTLYKASEDKASGRGTKQLIRKKDNMPTELYGGYTGSTSAFMSIVRLWKKDKPYYKVVGIPTRMAAKLANQAQLLDYLTKKFTTRKLVKKTGDYKTTVERFELVVPKVGFNQLVIDGGQPFMLGSATYQYNARELFISKEAVKALNKQLSTHVDLVQVFDEILVQVNRWFPLYDTNGFREKLSHGRDRFMKLNDSFEEKSDTQIDVLNRILIGFHANAARTNLKILGLGTDLGFMTQQAGIRLTEKAILVHQSPSGLFERKVALRDLKGLR

SEQ ID NO: 1012 - protein, 544 aa, Lactobacillus crispatus
KYYLYFMQLGRDAYTGKPINIDEVSQYYDIDHILPQSFIKDDSLNNRVLVAKPINNGKSDGVPLKLFGDNLATGLGITVKQMWNNWADKGLINKAKQNNLFLDPENINKHQASGFIRKQLVETSQIIKLATTILQAEYPKTKIIVVKASSNHYLRNEFDLYKSREVNDYHHAIDAYLTTICGNLLYQAYPKLRPFFVYGQFKKFSSDPKKENEILKKTKNFDFVAKLLGSKAPNEIRSQQGKVLFEKNKIRLQLNKAYNYKYMLVSRDTTTKNQEMFGMTIYPRAERDIAKSRKLIEKRKGFSTDIYGGYTGTAAAYMAIVRINKTKSSQYKVIAVPMTKRAILNKAEKEGNYEKILKQILSPSILYNDKGKRKAGVISFDIIKGKVPYNQVVQDGNKKFLLKSAIYLCNAKQLVLSEEAMRVITGHWLDSDKQDQELLDVYDEILEKIDRYLPLFDIRDFRNKLHKGREKFLKLNAEDKFKAIIQILKGLHDNSDTGELKDIGITVPFGQLQNNSGITLSSDTILVYQSPTGLFEKRVKISSL

SEQ ID NO: 1013 - protein, 298 aa, Lactobacillus crispatus
MDELNKISVNGKKLSVSVKQELYEDLFKKNNTVSAKQLKNWLIENQKLPYIKIKGLADQTKFNSSLSTYIKLKKSGLFVDKLDSNEFRDDFEKIIEWSTIFEDKQIYIQKLQTIDWLTAKQIQFLQNIRLQGWGRLSKKLLTAIVDSNGQNIIEQLWNSQQIFMSIVNKADIKGTITDANQDLMHSNSMEDILSEAYTSPANKKMIRQVVKVVHDIQKAASGQAPKQIAIEFARESRRNSKLSQTRGHKLQDIYQKISGDIVNKNLKDKLAEYIKNNQLSVWEKTSFQMNKNDQDFLF

SEQ ID NO: 1014 - protein, 279 aa, Lactobacillus crispatus
MNGKKLSVSVKQELYEDLFKKNNTVSAKQLKNWLIENQKLPYIKIKGLADQTKFNSSLSTYIKLKKSGLFVDKLDSNEFRDDFEKIIEWSTIFEDKQIYIQKLQTIDWLTAKQIQFLQNIRLQGWGRLSKKLLTAIVDSNGQNIIEQLWNSQQIFMSIVNKADIKGTITDANQDLMHSNSMEDILSEAYTSPANKKMIRQVVKVVHDIQKAASGQAPKQIAIEFARESRRNSKLSQTRGHKLQDIYQKISGDIVNKNLKDKLAEYIKNNQLNKDKYYTR

SEQ ID NO: 1015 - protein, 538 aa, Lactobacillus crispatus
MQLGRDAYTGKPINIDEVSQYYDIDHILPQSFIKDDSLNNRVLVAKPINNGKSDGVPLKLFGDNLATGLGITVKQMWNNWADKGLINKAKQNNLFLDPENINKHQASGFIRKQLVETSQIIKLATTILQAEYPKTKIIVVKASSNHYLRNEFDLYKSREVNDYHHAIDAYLTTICGNLLYQAYPKLRPFFVYGQFKKFSSDPKKENEILKKTKNFDFVAKLLGSKAPNEIRSQQGKVLFEKNKIRLQLNKAYNYKYMLVSRDTTTKNQEMFGMTIYPRAERDIAKSRKLIEKRKGFSTDIYGGYTGTAAAYMAIVRINKTKSSQYKVIAVPMTKRAILNKAEKEGNYEKILKQILSPSILYNDKGKRKAGVISFDIIKGKVPYNQVVQDGNKKFLLKSAIYLCNAKQLVLSEEAMRVITGHWLDSDKQDQELLDVYDEILEKIDRYLPLFDIRDFRNKLHKGREKFLKLNAEDKFKAIIQILKGLHDNSDTGELKDIGITVPFGQLQNNSGITLSSDTILVYQSPTGLFEKRVKISSL

SEQ ID NO: 1016 - protein, 206 aa, Lactobacillus crispatus
MQLGRDAYTGKPINIDEVSQYYDIDHILPQSFIKDDSLNNRVLVAKPINNGKSDGVPLKLFGDNLATGLGITVKQMWNNWADKGLINKAKQNNLFLDPENINKHQASGFIRKQLVETSQIIKLATTILQAEYPKTKIIVVKASSNHYLRNEFDLYKSREVNDYHHAIDAYLTTICGNLLYQAYPKLRPFFVYGQFKKFSSDPKKRK

SEQ ID NO: 1017 - protein, 857 aa, Lactobacillus crispatus
MTKLNNEYMVGLDIGTNSCGWVATDFDNNILKMHGKRALGSHLFDEGVSAADRRAFRTTRRRIKRRKWRLKLLEEIFDEEMAKVDPNFFARLKESGLSPLDTRKNVSSIVFPTKKMDKQFYKKFPTIYHLRNALMKQDKKFDLRAIYIAIHHIVKYRGNFLSNSSISNFSASKIEIDRFVNELNDLYSIFLPESGVIFDAGNASKVEDIIRNEQMFKLDKIKEIADVLPDTENKSGLKLSKKISKEISKAILGYKAKFEIILQVNVDKTDSSIWNFKLNDENADVNLSEITSDLTDTQLQILDLVRNLFSAISLLNIVDEGSTLSESMIRKYNDHAQDLKLLKTVIKNHSDRKKAHNLQLAYDKYVNNRHFVDVETKKAFPNKHLYRKSDFYEIVKKNLDASKEAVQIRKEIALDKFMPKQRSDENGVIPFQLNQIELDKIIENQGKYYPFLKEINPIKAHRMQAPYKLDELIRFRVPYYVGPMIEPTNSSYPQTRQNQSFAWMVRKAKGRITPWNFDEKVDRQKSANNFIKRLTTKDTYLFGEDVLPANSLLYQKYTVLDELNKISVNGKKLSVSVKQELYEDLFKKNNTVSAKQLKNWLIENQKLPYIKIKGLADQTKFNSSLSTYIKLKKSGLFVDKLDSNEFRDDFEKIIEWSTIFEDKQIYIQKLQTIDWLTAKQIQFLQNIRLQGWGRLSKKLLTAIVDSNGQNIIEQLWNSQQIFMSIVNKADIKGTITDANQDLMHSNSMEDILSEAYTSPANKKMIRQVVKVVHDIQKAASGQAPKQIAIEFARESRRNSKLSQTRGHKLQDIYQKISGDIVNKNLKDKLAEYIKNNQLSVWEKTSFQMNKNDQDFLF

SEQ ID NO: 1018 - protein, 857 aa, Lactobacillus crispatus
MTKLNNEYMVGLDIGTNSCGWVATDFDNNILKMHGKRALGSHLFDEGVSAADRRAFRTTRRRIKRRKWRLKLLEEIFDEEMAKVDPNFFARLKESGLSPLDTRKNVSSIVFPTKKMDKQFYKKFPTIYHLRNALMKQDKKFDLRAIYIAIHHIVKYRGNFLSNSSISNFSASKIEIDRFVNELNDLYSIFLPESGVIFDAGNASKVEDIIRNEQMFKLDKIKEIADVLPDTENKSGLKLSKKISKEISKAILGYKAKFEIILQVNVDKTDSSIWNFKLNDENADVNLSEITSDLTDTQLQILDLVRNLFSAISLLNIVDEGSTLSESMIRKYNDHAQDLKLLKTVIKNHSDRKKAHNLQLAYDKYVNNRHFVDVETKKAFPNKHLYRKSDFYEIVKKNLDASKEAVQIRKEIALDKFMPKQRSDENGVIPFQLNQIELDKIIENQGKYYPFLKEINPIKAHRMQAPYKLDELIRFRVPYYVGPMIEPTNSSYPQTRQNQSFAWMVRKAKGRITPWNFDEKVDRQKSANNFIKRLTTKDTYLFGEDVLPANSLLYQKYTVLDELNKISVNGKKLSVSVKQELYEDLFKKNNTVSAKQLKNWLIENQKLPYIKIKGLADQTKFNSSLSTYIKLKKSGLFVDKLDSNEFRDDFEKIIEWSTIFEDKQIYIQKLQTIDWLTAKQIQFLQNIRLQGWGRLSKKLLTAIVDSNGQNIIEQLWNSQQIFMSIVNKADIKGTITDANQDLMHSNSMEDILSEAYTSPANKKMIRQVVKVVHDIQKAASGQAPKQIAIEFARESRRNSKLSQTRGHKLQDIYQKISGDIVNKNLKDKLAEYIKNNQLSVWEKNSFQMNKNDQDFLF

SEQ ID NO: 1019 - protein, 347 aa, Lactobacillus crispatus
MVNLKSLVLILKKENEILKKTKNFDFVAKLLGSKAPNEIRSQQGKVLFEKNKIRLQLNKAYNYKYMLVSRDTTTKNQEMFGMTIYPRAERDIAKSRKLIEKRKGFSTDIYGGYTGTAAAYMAIVRINKTKSSQYKVIAVPMTKRAILNKAEKEGNYEKILKQILSPSILYNDKGKRKAGVISFDIIKGKVPYNQVVQDGNKKFLLKSAIYLCNAKQLVLSEEAMRVITGHWLDSDKQDQELLDVYDEILEKIDRYLPLFDIRDFRNKLHKGREKFLKLNAEDKFKAIIQILKGLHDNSDTGELKDIGITVPFGQLQNNSGITLSSDTILVYQSPTGLFEKRVKISSL

SEQ ID NO: 1020 - protein, 534 aa, Lactobacillus crispatus
RDAYTDKPINIDEVSQYYDIDHILPQSFIKDDSLNNRVLVAKPINNGKSDGVPLKLFGDNLATGLGITVKQMWNNWADKGLINKAKQNNLFLDPENINKHQASGFIRKQLVETSQIIKLATTILQAEYPKTKIIVVKASSNHYLRNEFDLYKSREVNDYHHAIDAYLTTICGNLLYQAYPKLRPFFVYGQFKKFSSDPKKENEILKKTKNFDFVAKLLGSKAPNEIRSQQGKVLFEKNKIRLQLNKAYNYKYMLVSRDTTTKNQEMFGMTIYPRAERDIAKSRKLIEKRKGFSTDIYGGYTGTAAAYMAIVRINKTKSSQYKVIAVPMTKRAILNKAEKEGNYEKILKQILSPSILYNDKGKRKAGVISFDIIKGKVPYNQVVQDGNKKFLLKSAIYLCNAKQLVLSEEAMRVITGHWLDSDKQDQELLDVYDEILEKIDRYLPLFDIRDFRNKLHKGREKFLKLNAEDKFKAIIQILKGLHDNSDTGELKDIGITVPFGQLQNNSGITLSSDTILVYQSPTGLFEKRVKISSL

SEQ ID NO: 1021 - protein, 278 aa, Lactobacillus crispatus
SVNGKKLSVSVKQELYEDLFKKNNTVSAKQLKNWLIENQKLPYIKIKGLADQTKFNSSLSTYIKLKKSGLFVDKLDSNEFRDDFEKIIEWSTIFEDKQIYIQKLQTIDWLTAKQIQFLQNIRLQGWGRLSKKLLTAIVDSNGQNIIEQLWNSQQIFMSIVNKADIKGTITDANQDLMHSNSMEDILSEAYTSPANKKMIRQVVKVVHDIQKAASGQAPKQIAIEFARESRRNSKLSQTRGHKLQDIYQKISGDIVNKNLKDKLAEYIKNNQLNKDKYY

SEQ ID NO: 1022 - protein, 277 aa, Lactobacillus crispatus
SVNGKKLSVSVKQELYEDLFKKNNTVSAKQLKNWLIENQKLPYIKIKGLADQTKFNSSLSTYIKLKKSGLFVDKLDSNEFRDDFEKIIEWSTIFEDKQIYIQKLQTIDWLTAKQIQFLQNIRLQGWGRLSKKLLTAIVDSNGQNIIEQLWNSQQIFMSIVNKADIKGTITDANQDLMHSNSMEDILSEAYTSPANKKMIRQVVKVVHDIQKAASGQAPKQIAIEFARESRRNSKLSQTRGHKLQDIYQKISGDIVNKNLKDKLAEYIKNNQLNKDKY

SEQ ID NO: 1023 - protein, 1368 aa, Lactobacillus curvatus
MSRPYNIGLDIGTSSIGWSVVDDQSKLVSVRGKYGYGVRLYDEGQTAAERRSFRTTRRRLKRRKWRLGLLREIFEPYITPIDDTFFLRQKQSNLSPKDQRKLYTQTSLFNDRTDRAFYDDYPTIYHLRYRLMTEKRQFDIREIYLAMHHIVKYRGHFLNEAPVSSFKSSEINLVAHFDRLNTIFADLFSESGFQLETDKLAEVKALLLDNQQSASNRQRQALSLIYTPSTNKAVEKQNKAIATELLKAILGLKAKFNVLTGIEAEDVKAWTLTFNAENFDEEMVKLESSLDDNAHQIIESLQELYSGVLLAGIVPENQSLSQAMITKYDDHQKHLKMLKAVREALAPGDRQRLKQAYDQYVDGQENTKAYSKEDFYGDITKALKNNPDHPIVSEIKKLIELDQFMPKQRTKDNGAIPHQLHQQELDRIIENQQQYYPWLAELNPNSKRQTVAKYKLDELVAFRVPYYVGPLITAEQQRQSSDAKFAWLIRKAEGRITPWNFDDKVDRQASANEFIKRMTTTDTYLLAEDVLPKQSLIYQRFEVLNELNGLKIDDQPITTELKQAIFTDLFMQKISVTVKNIQDYLVSEKRYASRPAITGLSDENKFNSRLSTYHDLKMIVGDAVDDVDKQADLEKCIEWSTIFEDGKIYSAKLNEIDWLTDQQRVQLAAKRYRGWGRLSAKLLTQIVNANGQRIMDLLWDTTDNFMRIVHSEDFDKLITEANQMMLAENDVQDVINDLYTSPQNKKALRQILLVVNDIQKAMKGQAPERILIEFAREDEVNSRLSVQRKRQVEQVYQNISNELLNNTEIRNELKDLSNSALSNTRLFLYFMQGGRDMYTGDSLNIDRLSTYDIDHILPQSFIKDNSLDNRVLVSQKMNRSKADQVPTDFTSVELGQKMQIQWEQMLRAGLITKKKYDNLTLNPDHISKYAMKGFINRQLVETRQVIKLATNLLMEQYGEDNIELITVKSGLTHQMRTEFDFPKNRNLNNHHHAFDAYLTAFVGLYLLKRYPKLKPYFVYGEYQKASQQDKWRNFNFLNGLKKDELVDENTEAVIWDKESGLAYLNKIYQFKKILVTRGVHENSGALFNQTLYAAKDDKASGQGGKQLIPAKQDRSTALYGGYSGKTVAYMCIVRIKNKKGDLYKVCGVETSWLAQLKQLTDEDSQKAFLEQKISPQFTKVKKQKGNIIEAVEEFEVIAPHILINQRFFDNGQELTLGSATYKHNEQELILDKTAVKLLNGALPLTQSEELAEQVYDEILDQVMHYFPLYDTNQFRAKLSTGKAAFMKLPWKSQWDGNKMVQVGQQVILDRILIGLHANAAMSDLKVLKMTTPFGMIQQSTGITLSADTQIIYQSPTGLFERRVALRDL

SEQ ID NO: 1024 - protein, 669 aa, Lactobacillus delbrueckii
MAKPKDYTIGLDIGTNSVGWVVTDDQNNILRIKGKKAIGARLFTEGKVAAERRSFRTTRRRLSRRRWRIKMLEELFDEEIAKVDPSFFARLHESWISPKDKRKRYSAIVFPSPEEDKKFHESYPTIYHLRDKLMKDDQKHDIREIYIAVHQMIKARGNFLHDESVETYRSGMSSLGGRSERNILSVQTLEELNDLFAENEGTEEVELNVASAEQINDILTGGHLNADSQKEISNLLLPSSFPSFDDKAKEKQVKKLINNVATNISKAWLGYKADFSTILNLAKVDKDQKKIFAFALQGGDEEDKVQELESLLEQSQTDIVDRLIEIRHAIVLSEIVPVGMTLSEAMIDKYDQHKEDLITLKAVIRNTKDKKKAAKLQAIYDLYVKKRHADLAKAMKLTGIKKRSELLDPEELKKGISSLLDDSPEAVEIKQRLEEKTFLPLQRSNNNGVIPNQLHQVELDEIIKKQSKYYPFLAEKNPDESEEAQKKAPTKLDALLTFRVPYYVGPMITKEEQEAQNGHSFAWMVRRDPQDHEAITPWNFEKKVDKMASATQFIKRMTTKDTYLLGEDVLPASSLKYQLFTVLNELNNLRVNGKKLTSDEKEQVIEGLFKKQKTVKADKFVKYWQAKHIGADIKVKGLSDPSKFNSTMSTYIDFKKIFGDQLNDVNRQR

SEQ ID NO: 1025 - protein, 544 aa, Lactobacillus delbrueckii
MTGCADYDVDHIMPQSFVKDDSLDNRVLVARAVNNQKSDKVPALLFGNKVVADLGITVREMWDKWQKLGMISKRKLSNLLTDPDALTEYRAQGFIRRQLVETSQVIKLTATILQSEFPDSKIIEVPAKYNSIVRKQFDLYKSREVNDFHHAIDAYLSTIVGNYLYQVYPNLRRMFVYGEFKKFSSNAEESAHDVARRVKSMNFLDDLLRGTHGDNIYCRSTGEIVFNRNDIISKLKQAYSFKQMLVTQEVFTKKSALFDQTVYPSPERDSKKRSGLIPRKKGMDTEIYGGYSGNKDAYFVLAEAVKEKGHTLQIVGVPIRALNTLKNSANYSEKLLEIIKPQVMFNKDTGKPIKGIKDVKILMDKIPCRQPVLEGESYYMLASSKYRYSLKQISLSQMSMKYILDYIDDPNFNKHEMINIDQQDEKECLLSVYDEILEKMDKYLPLFDIRSFRKKLHDGRDAFIALPVASEEKKPGEVDVIRKILKGLHANADITNLAELGFGTAALGALVSTGGIKISDDAVFIYQSPTGLFERRVKVSDLLK

SEQ ID NO: 1026 - protein, 1356 aa, Lactobacillus farciminis
MTKKEQPYNIGLDIGTSSVGWAVTNDNYDLLNIKKKNLWGVRLFEEAQTAKETRLNRSTRRRYRRRKNRINWLNEIFSEELAKTDPSFLIRLQNSWVSKKDPDRKRDKYNLFIDGPYTDKEYYREFPTIFHLRKELILNKDKADIRLIYLALHNILKYRGNFTYEHQKFNISNLNNNLSKELIELNQQLIKYDISFPDDCDWNHISDILIGRGNATQKSSNILKDFTLDKETKKLLKEVINLILGNVAHLNTIFKTSLTKDEEKLNFSGKDIESKLDDLDSILDDDQFTVLDAANRIYSTITLNEILNGESYFSMAKVNQYENHAIDLCKLRDMWHTTKNEEAVEQSRQAYDDYINKPKYGTKELYTSLKKFLKVALPTNLAKEAEEKISKGTYLVKPRNSENGVVPYQLNKIEMEKIIDNQSQYYPFLKENKEKLLSILSFRIPYYVGPLQSAEKNPFAWMERKSNGHARPWNFDEIVDREKSSNKFIRRMTVTDSYLVGEPVLPKNSLIYQRYEVLNELNNIRITENLKTNPIGSRLTVETKQRIYNELFKKYKKVTVKKLTKWLIAQGYYKNPILIGLSQKDEFNSTLTTYLDMKKIFGSSFMEDNKNYDQIEELIEWLTIFEDKQILNEKLHSSKYSYTPDQIKKISNMRYKGWGRLSKKILMDITTETNTPQLLQLSNYSILDLMWATNNNFISIMSNDKYDFKNYIENHNLNKNEDQNISDLVNDIHVSPALKRGITQSIKIVQEIVKFMGHAPKHIFIEVTRETKKSEITTSREKRIKRLQSKLLNKANDFKPQLREYLVPNKKIQEELKKHKNDLSSERIMLYFLQNGKSLYSEESLNINKLSDYQVDHILPRTYIPDDSLENKALVLAKENQRKADDLLLNSNVIDRNLERWTYMLNNNMIGLKKFKNLTRRVITDKDKLGFIHRQLVQTSQMVKGVANILDNMYKNQGTTCIQARANLSTAFRKALSGQDDTYHFKHPELVKNRNVNDFHHAQDAYLASFLGTYRLRRFPTNEMLLMNGEYNKFYGQVKELYSKKKKLPDSRKNGFIISPLVNGTTQYDRNTGEIIWNVGFRDKILKIFNYHQCNVTRKTEIKTGQFYDQTIYSPKNPKYKKLIAQKKDMDPNIYGGFSGDNKSSITIVKIDNNKIKPVAIPIRLINDLKDKKTLQNWLEENVKHKKSIQIIKNNVPIGQIIYSKKVGLLSLNSDREVANRQQLILPPEHSALLRLLQIPDEDLDQILAFYDKNILVEILQELITKMKKFYPFYKGEREFLIANIENFNQATTSEKVNSLEELITLLHANSTSAHLIFNNIEKKAFGRKTHGLTLNNTDFIYQSVTGLYETRIHIE

SEQ ID NO: 1027 - protein, 1313 aa, Lactobacillus fermentum
MHYLDEIFAPHLQEVDENFLRRLKQSNIHPEDPAKNQAFIGKLLFPDLLKKNERGYPTLIKMRDELPVEQRAHYPVTNIYKLREAMINEDRQFDLREVYLAVHHIMKYRGHFLNNASVDKFKVGRIDFYKSFNVLNEAYEELQNGEGSFTIEPSKVEKIGQLLLDTKMRKLNRQKAVAKLLEVKVADKEETKRNKQIATAMSKLVLGYKADFATVAMANGNEWKIDLSSETSEDEIEKFREELSDAQNDILTEITSLFSQIMLNEIVPNGMSISESMMDRYWTHERQLAEVKEYLATQPASARKEFDQVYNKYIGQAPKERGFDLEKGLKKILSKKENWKEIDELLKAGDFLPKQRTSANGVIPHQMHQQELDRIIEKQAKYYPWLATENPATGERDRHQAKYELDQLVSFRIPYYVGPLVTPEVQKATSGAKFAWAKRKEDGEITPWNLWDKIDRAESAEAFIKRMTVKDTYLLNEDVLPANSLLYQKYNVLNELNNVRVNGRRLSVGIKQDIYTELFKKKKTVKVSDVASLVMAKTRGVNKPSVEGLSDPKKFNSNLATYLDLKSIVGDKVDDNRYQTDLENIIEWRSVFEDGEIFADKLTEVEWLTDQQRSALVKKRYKGWGRLSKKLLTGIVDENGQRIIDLMWNTDQNFMQIVNQPVFKEQIDQLNQKAITNDGMTLREWVESVLDGAYTSPQNKKAIWQVVRVVEDIVKAVGNAPKSISIEFARNEGNKGEITRSRRTQLQKLFEDQAHELVKDTSLTEELEKAPDLSDRYYLYFTQGGKDMYTGDPINFDEISTKYDIDHILPQSFVKDDSLDNRVLVSRAENNKKSDRVPAKLYAAKMKPYWNQLLKQGLITQRKFENLTMDVDQNIKYRSLGFVKRQLVETRQVIKLTANILGSMYQEAGTDIIETRAGLTKQLREEFDLPKVREVNDYHHAVDAYLTTFAGQYLNRRYPKLRSFFVYGEYMKFKHGSDLKLRNFNFFHELMEGDKSQGKVVDQQTGELITTRDEVAKSFDRLLNMKYMLVSKEVHDRSDQLYGATIVTAKESGKLTSPIEIKKKRPVDLYGAYTNGTSAFMTIIKFTGNKPKYKVIGVPTTSAVGLKRVGKPGSESYNQELHRIIKSNPKVKKDFEIVVPHVSYSQLIVDDDCKFTLASDTYQHPATQLVLSKESMEIIADDFKFVKENTATADEQLVRVFDEIVNQMNHYFTIFDQRSNRQKVTKARDKFVSLPTESEYEGAKKTQVGKTEVITNLLMGLHANSAQGDLKVLGLSTFGFFQSSGGLNLSEDAMIVYQSPTGLFERRICLKDI

SEQ ID NO: 1028 - protein, 1327 aa, Lactobacillus florum
MTEQQQPYNIGLDIGTSSIGWAVTDQNDKLLHIRGHNGIGVRLFKEGESAAERRGFRTTRRRLSRRRWRLRFLDRIFDAELAKVDPNFLARLKQSNISPLDPNKQMFGNILFDDPQFDDQKFHQQYPTIYHLRSALAQPDAPQADVRLIYLALHHMIKFRGHFLNGAAVEKFHGGQLHLESEFQELNQIFSNQQRDHVQLQTSSLDEVATILKDNQRTPSDRQRELSARLFVPVDKTIDKENKKLATELLKAVLGLKAKFDVILGVEATDPQAFKLQFSSDDFDDKIAELASELTDEANEILTVLQRLYFSLNLADILTNRQTKQVADSISTAMINRYDDHKHHLKMLKELEAQVTQEQRDGLKKAYDEYIDGDKPTIDTFYTNIKKNLDDSELANQIKSLIDLQAFMPKQRSKENGSIPHQLHQRELDQLIEVQGKYYPWLLAAKDKLDALIAFRVPYYVGPMIDPNQSDDPQNTKFAWMVRKEAGEITPWNFEEKVDKTSSATNFIKRMTTTDTYLLGEPVLPKNSLLYQQFTVLNELNKLKVNGKALTVDQKKYLYEHVCKKQRRVTLKKLSDCLMARGDFPMGAIFTGTTDQKNMNNTLKTYQDFQEIFGDEIDNPDRQVDFEKMIEWSAIFEDREIFKLKLAELNWLTSEQLERVSKKRYQGWGRLSQKLLTHIVNENGERIIDQLWNTNQNFMEIMGQDSVKQAIQEHNGANVAQTGINETIDELYTSPQNKKAIRQILLVVDDIKKAVGYAPANIMMEFAREDRDDHRLIASRARQLEKTYQEISKNWFDNESVTQELKDQIKNKTKFTDRLYLYFIQGGIDLYTGHPLNIDQLSSYDIDHILPQSFLLDNSLNNRVLTSQAENRVHKEDRLPGETVANKMRPTWKMMREQGLMTQRKYNNLTLKPDQISKFNNRGQFINRQLVETRQVIKLAADIMSQKYQADQTKVVTVKANLTHHMREKFNFYKSRNVNDYHHAFDAYLTLFVGNWLLKEYPKLQPYFVYGDFAKTGTNNLKSFNFLYRFERDHKLNDKGAIDTDKDQQLGYMKRIYRFKKMLVTKQLETNEGALYGQTLYPAPKNDKKTRNLINSKKNRPSDIYGGYSNENGSFLTLVKLKKGSKYDYRLVAVPVSKISEIKESELATIEKAIAPQFLKSSGKYRDFQVVLSKILINQKVIDDGMIFTIGSKSYKHNAKQVVLSDNSIQIVSTLSRISDKEKLITVFDEIVDITSKYLPWYKVNDVEKTKMLFRQMQDIDEMKKIIDNSLIGLHCNASITDLGKVGLSKYWGRFVLTAGISLTVDAQLIYQSPTGLFEHRVKVSDL

SEQ ID NO: 1029 - protein, 1386 aa, Lactobacillus hominis
MTKITEDYIVGLDIGTNSCGWVAMDSKNTILRMHGKTAIGSHLFDAGNSAADRRAFRTTRRRIKRRKWRLKLLEEIFDSHLAKVDPYFFARLKESGLSPLDTRKNVSSIIYPTSLEDKKFYVDNPTIYHLRYKLMTEDRKFDLREVYLAIHHIVKYRGNFLYNTPVKAFEASKIDVKGSLKKLNELYEGLDSEFNVELDSNNALEIENIIRDKKIFKINKVKEINQLLSLKTEDKERTKLMKDVSKQIVNAILGYKTKFETILLKDVSKDEADDWEFKLTDVDADNKFENLIGDLNENEQEILLVIRKLANAITLSNIVEEGKTLSESMKDKYKKHSDDLKLLKQVISDHPDRDKAKKLALAYDLYVNNRHGKILQAKDILEKKKTLSKEDFYKEIKKNLDDSKESQEILDAISLDSFMPKQRTNENGVIPYQLHQLELDKIIENQGKYYPFLKEVNPVSSHLKQAPYKLDELIRFRVPYYVGPLISPNESTKNKQTKKNQNFAWMIRKEQGQITPWNFDQKVDRMASANKFIKRMTTIDTYLLGEDVLPANSLLYQKFTVLNELNNVKINGKRISVPLKQELYNNLFKKNSTVTTNKLKSYLKENYKLIKVEIKGLSDEKKFNSGLTTYNKLKNLKIFDQQIDDPNYNKDFERIIEWSTIFEDKAIYKEKLKTIDWLSDRQIDKLSKIRMQGWGQLSKKLLSQLTDNNGQTIIEQLWDSQNNFMQIVNQADFKDAIAVANQNLLVDTSVEDILNEAYTSPANKKAIRQVVKVVDDIVKATSGKVPKQIAIEFTRDADDNAKISQSRANKLRKVYKEMSNELASETIRNELERVAKDQKLLKDKHYLYFMQLGRDAYTGELIDIDNLEQYDIDHVLPQSFIKDDSLENRVLVKKAVNNGKSDNVPVKLYGNRMATDLGMTIRHMWEKWKEQGLITKTKYNNLIIDPDKINKYESSGFIHRQLVETSQIIKLVSTILQSKYPDTEIIVVKARYNHYLRKRLNLYKSREVNDYHHAIDAYLSAICGNLLYQVYPYLRPFFVYGQYKKFSSEPEKEKIIYDKTRRYNFISQIFENKDNDIISRETKKKVFDKKDIIEKLKRAYNYKYMLVSRETETHDQEMFKMTVYPRLSRDTKKSRNLIPKKKDMPTEIYGGYTNNSDAYMIIARINKKKGPEYRVFGVPMRELVNLRKAEKNGHYKAYLKQVLEPEIMYSKNGKKNKTISSFEIVKAKVPYKQVILDGDKKFMLASSTYVQNAKQLTLSQYSMQAITDNCENDTEEEKALVEAYDEILTNIDKYLPLFDINKFREKLHAGREKFVDLPLAEKKETILQVLNGLHDNAVMPKIKSLGLSTPLGFMQFHTGVSLSENAKLIYQSPTGLFEKRLKISDL

SEQ ID NO: 1030 - protein, 270 aa, Lactobacillus iners
MITYLKDNDDITLSFPKDQLINIFKNSNLNSTEKSDQLKPFFGRTNLEKGIIKLLSGGKQDLSNMFRDETLKNSNYKNLKFSDNRFDDERDGYAADLGDRIDLLILLKQIYDASILESMMSQARVSIDGHKYISSAKVCAYEKHKSDLKRLKSLIKKYLPSEYNNIFRKITEKDNYVAYSKSNITNNKREKALKYVKYVDFTKYLTKKLKTIKTQDAEDDQEIFEIKGELEKQSFLPKQRTLDNSIIPYQLHLMELKKYLIINLNIMTFC

SEQ ID NO: 1031 - protein, 255 aa, Lactobacillus iners
MITYLKDNDDITLSFPKDQLINIFKNSNLNSTEKSDQLKPFFGRTNLEKGIIKLLSGGKQDLSNMFRDETLKNSNYKNLKFSDNTFDDERDGYAADLGDRINLLILLKQIYDASILESMMSQARVSIDGHKYISSAKVCAYEKHKSDLKRLKSLIKKYLPSEYNNIFRKITEKDNYVAYSKSNITNNKREKALKYVEYVDFTKYLTKKLKTIKTQDAEDDKEIFEIKGELEKQSFLPKQRTLDNSIIPYQLHLME

SEQ ID NO: 1032 - protein, 343 aa, Lactobacillus iners
MLAKDDQEGITVKDKIISLLTFRLPYYIGPVNPAVHGKFAWVKRLANGKVTPWNYKEKIDIDASHEEFIKTKLSKCSFLIGCDVLPKNSLLYQKYMVLSELNTIKFNGVNISEKLKDDIYQNLFKNIQKVTKKRLQNYIKEHENIIGDVIVTGIDNAFKQGLVSYLKFKKIIGDKIDDDRYQKVLEKIIRDITLYDECAGKKIKKEYKDSDLFTEDELNKIVKLTFNDWGRLSAELLDQLEGEDTVSGETGKIIEFMQKHNYNLMQLMSKKFTFKYKIDEINKSYYQHDKFNYKSMIDSLYVSPATKRILWQSLKVVHEISKIMKHDPEKIFYRNGTFQRRSS

SEQ ID NO: 1033 - protein, 447 aa, Lactobacillus iners
MLYDHKLIGDKKYARLIRSKAFTDDELAGFIARQLVETRQATKETADLLKRLCPKSRIVYAKAQNASIFRQKFDIPKSRTINDLHHAQDAYLNIVVGNIFDTKFTQDPRNFIKNTKDSRNYNLEKIYDYNVERNNYVAWIAPDSKTNGTIANVKCNLSTKDFRVTRPSFYKKGALFNQNLSRKGSNLAPIKEHSPKSNPLKYGGYSGKNNSFFVVVAGKDNKGKDIVKLIPVNTLIYNKMLHCDYKAKQELLTSYVANNFAINNFRIVKDDIKMYSLVKIDGAYYYLVGGTDERIEVKNAMQLLLSKDSIKAVKILEKESKDQFANIKNYKDIDIKLGRTFNEVISKYTNSVFGKSMLISDKYRKDIFKSVDKSILEFNSLNTIAKADNLLKFVTSMRPAGSVDALKMVGLIERIRKSNVISNFNEFKLINQSVTGLFENEEDLLKL

SEQ ID NO: 1034 - protein, 667 aa, Lactobacillus iners
MQKHNYNLMQLMSKKFTFKSKIDEINKSYYQHDKFNYKSMIDSLYVSPATKRILWQSLKVVHEISKIMKHDPEKIFIEMARSKEDHPKRKLSRKADLKQVYKDSKKQIISIIGKDKYQDLSNELDNKDDRDLRWDNLYLYYTQLGRSMYSLKPIDISELMNKNLYDQDHIFPKSKKYDDSIENRVLVEKELNVKKSDIYPISDANIIPQKIKGQVESFWKMLYDHKLIGDKKYARLIRSKAFTDDELAGFIARQLVETRQATKETADLLKRLCPKSRIVYAKAQNASIFRQKFDIPKSRTINDLHHAQDAYLNIVVGNIFDTKFTQDPRNFIKNTKDSRNYNLEKIYDYNVERNNYVAWIAPDGETNGTIANVKCNLSTKDFRVTRPSFYKKGALFNQNLSRKGSNLAPIKEHSPKSNPLKYGGYSGKNNSFFVVVAGKDNKGKDIVKLIPVNTLIYNKMLHCDYKAKQELLTSYVANNFAINNFRIVKDDIKMYSLVKIDGAYYYLVGGTDERIEVKNAMQLLLSKDSIKAVKILEKESKDQFANIKNYKDIDIKLGRTFNEVVSKYTNSVFGKSMLISDKYRKDIFKSVEKSILEFNHLDTIGKADNLLKFVTLMRPSGSAHSLKMVGLIERIRKSNVISNFNEFKLINQSVTGLFENEEDLLKL

SEQ ID NO: 1035 - protein, 1395 aa, Lactobacillus jensenii; identical to SEQ ID NO: 113

SEQ ID NO: 1036 - protein, 1382 aa, Lactobacillus mucosae
MDIGTNSIGWTAIDDHFSLLRVKGKNAIGVRTFKEGETAADRRGFRTARRRLSRRRWRLQFLDEFFAPYLAEVDPNFLARLKQSDISAKDPAKNQEYMGKLLFPDQEAASDGNGYPTLIQMRKAMPAEKAADFPVFNIYQLRYALMNEKRKFDLREIYLAVHHIVKYRGNFLNNTSVDKFKADQIDFNKSFETLNDLFRQVQPIAPFQIDLTKVDELGKLLLDTKQKKLDRQKAVAKLLPLIEDGTDKEIVKAHQQTAREISKLILGYKAKVGLILQNNLDQTLDMSTENSDDQLMQIAEELDDYQMELINQLSLLYSQIMLNEIVPNGETVSASMLNRYYKHRCQLKELKDYGAAQDKKTREQLDHLYAEYIGQIPKDSKFDFTKDLKKLMDKSDLGQKIKDEIEAGDYLPKQRTSANGVIPHQMHQQELDQIIENQKEYYPWLAEPNPVEKNIKNAKYKLDQLVSFRVPYYVGPMITLADQQKTSKASFAWAVRKKAGKITPWNFYDMIDREKSANNFIKRMTNKDTYLLSEDVLPASSLLYQKFTVLNELNNIRVNGRKLQPALKQAIYTDLFQKRKTVNLKTLTNFLAIHEPTLTKPKIEGLSNGRSFNSSLGTYIDMSKILGDSLDDLNYRDDIEKIIEWSTVFEDSEIYGVKLQEIQWLTNEQREKLVRKRYQGWGRLSKKLLTGITDENGQRIIDLMWDTSKNFMQIVHQPVFEEQIAELNQQLLQDADKAPLEVVDDILADAYTSPQNKKAIRQVVKVVADVVKAVGNAPASISIEFARNEDRNKELKNSRRHSIEKLYHETAEKLVKQTNLLEELGNVKDLNDRYYLYFTQAGRDMYDGTPINIDEISTHYEIDHILPQSFLKDNSLDNRVLVKKSENAAKSDRVPAKLYGAKMRAFWKQLKESQLISNRKYLNLTTDPEQVDKYQMQGFVHRQLVETRQIIKLAANIFGSLYPDSAVIETRAELTKQLREKFSLYKVRDVNDYHHAVDAYLTAFAGHYLYQRYPKLRPMFVYGDYAKIYADDLKRLRSVNLFHDLEKDQYNSGTAVNPETKEKIVDVDWLSDYVSKIQHFKYMLISKAVYTQHGQLYGATILPVAQVDKISAPIGIKDDKPVDIYGAYTNEVAAYMAIVRVNGKKPKYKVVSVPVRMLQRLKMAEQKGHDQYMQTLHDVLLRNFTSLKKNRKTGLKEAVVKDFDVLVPCVRYNQLVIDGDTKFTLGSATYQHNAKQLVLCNHSLETLANNFEYVRKHPDEADERMIMLYDDILDQVNHYFTLYDKNKFREKLNAGRDKYLKLPTFSQFENNKKTAIGKSEAIINILRGLHANAAITNLKCLGVSTPFGQLQSPSGIELSENAKLVYQSPTGLFSREVLLKDL

SEQ ID NO: 1037 - protein, 1382 aa, Lactobacillus pentosus
MKKIVNYNLGLDIGTSSIGYAAIDDQGRPVRHQNKTVMGVRLFKEGKTAESTRIFRGTRRRLSHRHWRLGYLDRIFDNEIAKVDENFLPRLKASKRARSDEKRSFRGSLLFPETGDDAYYQKYPTIYHLRYALITQKKQFDIRLIYLALHHMIKYRGNFLDTTPVSAFNIHDIDLTDQFASLNDCYQLLDMDFEFQFDLNNIEQVQKLLLDETLSKTKRQAAVSKVLVMSTGNKAFDDQQNGIASEFIKALLGGPFDLSKILNLSVADVKSWKLHMTDKDVDDTLNSLVEELDENHKQIVNLLQMIYSQVMMLGLLNGQQSISASMIERYDDHAKHWAALKKLLPALGEQEQSTIIHAYTAYTGHSRTKQLSRAEFYTKVNSILKKHENIAEATGLIELIDRNEFMPKQRDAVNGVIPHQLHQRELQLIIQNQQKYYPFLAAKAYPDADETMIEQLLSFRVPYYAGPLVDRDFINESSDQEQAMQNTKFSWLKRREAGEITPWNFEQKVDVQETANRFIKRLTTKDTYLMTEDVLPKESLIYQRFEVLNELNAIRINDRRLTAENKQLAFQQLFMAGNTKNVSIKKFRNFVFDSLKFPEKVKITGFAGQHNFLAKLSTYHDFKKIFGERVDHTDLQPDFERIVEWCTIFEDRHIYREKLKEIQWLSQSEIDQLVLIRNHGWGRLSKRLLTGIRDSDGRTVMDQLWFGTDNFMRIISQSDFAAAIANENRTQLNQHGLEDVLDSAFMSPQNKKAIRQVLKVVDDIEQTLGCPPKKVMIEFTRSPDKKKQRTVTRLEKVQQAYKAVADQLAGQSIVSELDQYANTHSKLSDTYYLYFMQLGRDLYSGKPIDIDSPMLDDDHILPRAFMKDNSLDNRALTEKPINNTKAAKFPSKVFGQQKEVTDFWKLLRRCGLMSNIKEKHLYLDPDNVDKWTRRGFIHRQLVETSQVIKIVANILNDRYQQSQTEVLEVPARLGTELRECFGWYKVREVNDYHHVFDAYLAAFIGNYLYRRYPKLQPYFVYGNFAELNKAQLKNIKSFNFLYNITDNKRVVKDIETGQTLWDDQIRQQIQHIYEYKYMLTSHEAFTQHKELYGQTIYPRREFKPGTLKAIKQDQPQELYGGYKNLTAAYMCIVKIQARKRRAAEYRVVRVATESLSALQQAKRLGVQAYERCLRQELVRNNEILRTNADPNSAPREFEVLLDRVLCHQMIISDGQKYLLGSHAYKINCMQLVLSNNSMKILSTSIVKLKQMTNEPLVQVYREILDVVNKYFTLYDVNSFRENLNQFFDKFRTLPITNEYESSKSGKKLIHRGQLETLTLILRGLHANSDKVQYGDQSTLLGGFQTKDGIKLSKDSVIQYTSPAGLNVRTVKLRDLEQKEAQK

SEQ ID NO: 1038 - protein, 1361 aa, Lactobacillus pentosus
MNEPYGVGLDIGTNSVGWTVVDMNGRVRKVKGKTALGARLFKEGATAEDRRGFRTTRRRLKRVKWRLRLLREFFDQPISKIDPNFFARRKYSDISPRDPNYNGLAKTLFNDRTDKEFYDDYATIYHLRDKLMTSNRKFDIREIYLAIHHIVKYRGNFLRTGPASQYGSASLHLATSFQKLNDLFAQSEETLNLKLVTDEALLQQIQQILVRTDLSRSEQQRQIWPLMAVLTGASAAEKKRQKNVVVELSKALVGLKAKMNVVTLTEVDAAVVKDWTFTMEESQDKLPEIEEQLSEVGQQIMDEVIQLYASVNLAQLIPAGKRFSQHMVEKYKHHEKNLELLKAYIHSQSDSKRGREIRATYDRYIDGVDSKPVTQEMFYKDLMKYVEADATSNHLAAEIKDEIDSEQFMPKLRTKQNGSIPYQVQQYELDQIISHQKKYYPWLGEENPVAERRGKFPYKLDELVGFRVPYYVGPLITKEDQQATSGAGFAWMVRKADGPITPWNFDQKVDRIASATAFIQRMQTTDTYLIGEDVLPARSLIYQRFMVLNELNNMRVEDRKLAPQQKQRLYNQVFKQHQHVSVKNIQQNLMDAGEYRKTPQITGLADPKGFNSSLSTYHDFKKILLEAIADEHKRADIEKIILWSTTFEDSAIFKQKLEEVAWLTDAQRKQLSGLRYRGWGQLSHKLLTAFKDDKGRSIMDGLWETSDNFMQLRKQPAIETQIKEANQANLTDADIQDTINELYTSPQNKKAIREVMLVLDDIKNAMHGQTPSWIFVEAARGGGVAGRRTQSRSSQIVEAYKGTAKEIVSEKVQHELNEKIKAKADFNTRLVLYFLQNGRDLYTNEAINIDRLSEYDIDHILPQSLVKDDSLDNRVLTSARINREKNDTFASEKFGRKMGAQWRELHRNGLMTQRKLKHLLMRPDEISKHATDFINRQLVETRQVIKLVEELISSEYPAASIVAVKANLTHQFRQTFNFPKLREVNDYHHAFDASLTAFIGMYLLKQYPKLERFFVYGKFAKQPINLTRFNIIRKLAVAEKPIANIETGEILWDKTADIKYFEKLYNYKRLLVTHEVRENYGAMFKQTLFKASYNKSKTLVPKKNHMETSVYGGYSNQETAYLAIVRIPFKSGFKFIVVGIPTRMVAKIKHYQSLGATLNQATHKVIEPKFTKISRKTKQTVISDYEVVLPKVYLDQVVRDQVKGQMYRFSLGSDKEYHNVQELYLPLSIQQAFVGHYDESDDQRSNDLVKVYDAALKQLQRYFPLHLSRNFDQVASQAHQSFEGLKNNVQTSDKQLGKKEVLNSLFVGLHANATRSNLSVLGMSKDFGRIKSNGITLTDQAEIIYQSPTGLFERKVALKDL

SEQ ID NO: 1039 - protein, 1358 aa, Lactobacillus pentosus
MNEPYGVGLDIGTNSVGWTVVDMNGRVRKVKGKTALGARLFKEGATAEDRRGFRTTRRRLKRVKWRLRLLREFFDQPISKIDPNFFARRKYSDISPRDPNYNGLAKTLFNDRTDQEFYHDYPTIYHLRDKLMTSDRKFDIREIYLAIHHIVKYRGNFLRTGPASQYGSASLHLATSFQKLNDLFAQSEESLNFKLVTDEAQLQQIQQILVRTDLSRSEQQRQIWPLMVVLMGATAAEKKRQKDFAKELANALVGLKAKLNVVTLTNVDTTVVKDWTFTLEESQDKLPEIEEQLSEVGQQIMDEVIQLYASVNLAQLIPAGKRFSQHMVEKYNHHEKNLELLKAYIHSQSDSKRGREIRATYDRYIDGVKSKPVTQEMFYKDLMKYVEADATSNHLAAEIKDEIDSEQFMPKLRTKQNGSIPYQVQQYELDQIISHQKKYYPWLGEENPVAERRGKFPYKLDELVGFRVPYYVGPLITKEDQQATSGAGFAWMVRKADGPITPWNFDQKVDRIASATAFIQRMQTTDTYLIGEDVLPARSLIYQRFMVLNELNNMRVEDQKLAPRQKQRLYNQVFKQHQHVSVKNIQQNLMDAGEYRETPKITGLADPKGFNSSLSTYHDFKKILPEAIADEHKRADIEKIILWSTTFEDSAIFKQKLEEVAWLTDAQRKQLSGLRYRGWGQLSHKLLTAFKDDNGRSVMDGLWETSDNFMQLRKQPAIETQIKEANQANLTDADIQDTINELYTSPQNKKAIREVMLVLDDIKNAMHGQTPSWIFIEAARGGGVAGRRTQSRSKQIVEAYKSTAKEIVSEKVQHELNEKIKAKADFNTRLVLYFLQNGRDLYTNEAINIDRLSEYDIDHILPQSLVKDDSLDNRVLTSARINREKNDTFASEKFGRKMGAQWRELHRNGLMTQRKLKHLLMRPDEISKHATDFINRQLVETRQVIKLVEELISSEYPSASIVAVKANLTHQFRQTFNFPKLREVNDYHHAFDASLTAFIGMYLLKQYPKLERFFVYGKFAKQPINLTRFNVIRKLAVAEEPIANIETGEILWDKTADIKCFEKLYNYKRLLVTHEVRENYGAMFDQTIFKATDSRKRLIQKKKGFATETYGGYTGRTLAYLAIVKVVTNKDTQYQVVGIPTTMVTQIQQLEASGLTSKQAVTKAIGAMINENNKKLQSYEVLLPKVRFEQVVRDEVKGHIHRFALGTDTYYHNIQELYLPLTIQRAFLGKRNDTDAQTEQNLLTVFETTLAQVNRYFPLYEMNKFKQILNSAQEKFAALPTKNKTVKNKLVTGKDGVLNNLFIGLHANASLGDLKILGMKIGFGKLQVPGGLKLTDQAEIIYQSPTGLFERKVALKDL

SEQ ID NO: 1040 - protein, 1358 aa, Lactobacillus plantarum
MKEPYGVGLDIGTNSVGWTVVDASGHVRKIKGQTGIGVRLFKEGAAAADRRGFRTTRRRLKRVKWRLRLLREFFDQPISKVDINFFARRKYSDVSPRDPNYNGLEKTLFNDRSDQDFYHDYPTIYHLREALMTQHRKFDVREIYLAIHHIVKYRGNFLRNDAATAYRSGTLDLQQHFETLNHLFSQADLELNLNLTTDVALLDSIKQTLVRTDISRSDRQKLIMPLLAVLTGATTAEKKRQKAVVTEFAKALVGNKTKIDVLTLTDIDATEAKDWAFSLEENQDKLPGIEDRFSEVGQQIIDEVIRLYASVNLAQLIPEGKRFSQSMVEKYKRHGEDLKLLKAYIRSQSDAKRGRAIRATYDQYIDGVKSKQVTQEAFQKALGKFVDADVDLNSWAAQIKQAIDSEQFMPKLRTKQNGAIPYQVQQNELDQIISNQKEYYPWLGEENPVIKRRGKFPYKLDELFGFRVPYYVGPLITKEMQAATANAGFAWMVRKADGPITPWNFDDKVDRVASATAFIQRMQTTDTYLIGEEVLPARSLIYQRFMVLNELNNIRVDDGQLTPRQKQRLYNQVFKKHKRVTAKNIQDNLVAAREFPTAPRITGLADPKVFNSSLSTYHDLKQVLPEAMSDVRKQADIEKIILWSTIFEDSTIFKQKLTEISWLTAAQLKQLGQLRYRGWGQLLRKLLTGLKDDNNRSIMDGLWETNANFMQLRSQPAIENQIKSANQANLTTADLQDTINELYTSPQNKKAIREVMVVLADIKDAMHGQTPNWIFVEAARGGGVAGRRTQSRSKQIVAAYQGTAQAIVRDQVQRELKEKIKNKANFNTRLVLYFLQNGRDLYTGDAINIDRLSEYDIDHILPQSLVKDDSLDNRVLTNARINREKNDTFASEKFGKKMGAKWKEMHRMGLMTKRKLDHLLMRPDEISKYATGFINRQLVETRQVIKLVEELINAEYPSTAIVSVKANLTHQFRQTFDFPKIREVNDYHHAFDAALTAFIGTYLLKRYPKLERFFVYGKFAKQPVNLTRFNVIRKLAKTDTPITDIDTGEVLWDKLTDIKYFETLYDYKRLLVTREVSENYGAMFDQTLLKASDNGKRLIRKKQSFDTAIYGGYTGKTLAYMAIVKVSTKKDVQYQVVGVPTTMVTQIEQLEQQGMTNKQAVTKVIEPLIAANNKKMLTYEVLLPKVRFEQVVRDRIKGQTHRFALGTDTYYHNIQELYLPLTLQRAFLGKQNESEVQLNQNLLTVFDATLAQVNRYFPLYEMNKFKKILNSARDQIELLEAKNQFVKNKLVLGKQGILTNMFIGLHANASYGDLKVLGVKIDFGKLQVPGGIKLTGDAEIIYQSPTGLFERKIALKDL

SEQ ID NO: 1041 - protein, 1361 aa, Lactobacillus rhamnosus
MTKLNQPYGIGLDIGSNSIGFAVVDANSHLLRLKGETAIGARLFREGQSAAERRESRTTRRRLSRTRWRLSFLRDFFAPHITKIDPDFFLRQKYSEISPKDKDRFKYEKRLFNDRTDAEFYEDYPSMYHLRLHLMTHTHKADPREIFLAIHHILKSRGHFLTPGAAKDFNTDKVDLEDIFPALTEAYAQVYPDLELTFDLAKADDFKAKLLDEQATPSDTQKALVNLLLSSDGEKEIVKKRKQVLTEFAKAITGLKTKFNLALGTEVDEADASNWQFSMGQLDDKWSNIETSMTDQGTEIFEQIQEHYRARLLNGIVPAGMSLSQAKVADYGQHKEDLELFKTYLKKLNDHELAKTIRGLYDRYINGDDAKPFLREDFVKALTKEVTAHPNEVSEQLLNRMGQANFMLKQRTKANGAIPVQLQQRELDQIIANQSKYYDWLAKPNPVEKHRASKPYQLDELLTFRIPYYVGPLITPKEQAESRENVFAWMIRKDPSGNITPYNFDEKVDCPASANMFIQRMKNTDTYLIGEDVLPKRSLLYQKYEVLNELNNVSIDGRRLGADQKQRLIREVFERHSSVTIKQVAENLVAHGDFAKRPEIRGLADEKRFLSSLSTYHQLKKILHEAIDDPTKEHDIENIITWSTVFEDAAIFKTELAKISWLDSDTIKALSNIRYRGWGQFSRKLLDGLKLGNGHTVIQELMLSNHNLMQILTDETLKTTMAELNQDKLKADDIEDVINDAYTSPSNKKALRQVLRVVEDIKHAANGQDPSWLYIETADGPGTAGKRTQSRQKQIQTVYANAAQELIDSAVRGELEDKIADKASFTDRLVLYFMQGGRDIYTGAPLNIDQLSHYDIDHILPQSLIKDDSLDNRVLVNATINREKNNVFASTLFASKMAATWRKWHEAGLISGRKLRNLMLRPDEIDKFAHGFVARQLVETRQIIKLTEQIAAAQYPNTKIIAVKAGLSHQLREELDFPKNRDVNHYHHAFDAFLAARIGTYLLKRYPKLAPFFTYGEFAKVDVKKFREFNFIGALTHAKKNIVAKDTGEIVWDKERDIQELDRIYNFKRMLITHEVYFETADLFKQTIYAAKDSKERGGSKQLIPKKQGYPTQVYGGYTRENTAYLAVVKTVEKKADVYRVVRIATSQVAALKEARAQSTVKERELLKKFLTTKFTKIGKNGKKAITPFDIVIPRVPREQLFHNKRYGFFMVNSDTLMHNYQELWMSRSDQQILSKLVKSAKTVENGQVGRLFENIVEQINKYFPLYDINQFRKKLDQSKDIFSKLPLEGNGTTSGKRETIQNILTGAGTGAKNGDLKNLGIKTPFGFLQVPSGIVLDDDTTLIYQSPTGMLNRIVRLSEL

SEQ ID NO: 1042 - protein, 1361 aa, Lactobacillus rhamnosus
MTKLNQPYGIGLDIGSNSIGFAVVDANSHLLRLKGETAIGARLFREGQSAAERRESRTTRRRLSRTRWRLSFLRDFFAPHITKIDPDFFLRQKYSEISPKDKDRFKYEKRLFNDRTDAEFYEDYPSMYHLRLHLMTHTHKADPREIFLAIHHILKSRGHFLTPGAAKDFNTDKVDLEDIFPALTEAYAQVYPDLELTFDLAKADDFKAKLLDEQATPSDTQKALVNLLLSSDGEKEIVKKRKQVLTEFAKAITGLKTKFNLALGTEVDEADASNWQFSMGQLDDKWSNIETSMTDQGTEIFEQIQELYRARLLNGIVPAGMSLSQAKVADYGQHKEDLELFKTYLKKLNDHELAKTIRGLYDRYINGDDAKPFLREDFVKALTKEVTAHPNEVSEQLLNRMGQANFMLKQRTKANGAIPVQLQQRELDQIIANQSKYYDWLAKPNPVEKHRASKPYQLDELLTFRIPYYVGPLITPKEQAESRENVFAWMIRKDPSGNITPYNFDEKVDCPASANMFIQRMKNTDTYLIGEDVLPKRSLLYQKYEVLNELNNVSIDGRRLGADQKQRLIREVFERHSSVTIKQVAENLVAHGDFAKRPEIRGLADEKRFLSSLSTYHQLKKILHEAIDDPTKEHDIENIITWSTVFEDAAIFKTELAKISWLDSDTIKALSNIRYRGWGQFSRKLLDGLKLGNGHTVIQELMLSNHNLMQILTDETLKTTMAELNQDKLKADDIEDVINDAYTSPSNKKALRQVLRVVEDIKHAANGQDPSWLYIETADGPGTAGKRTQSRQKQIQTVYANAAQELIDSAVRGELEDKIADKASFTDRLVLYFMQGGRDIYTGAPLNIDQLSHYDIDHILPQSLIKDDSLDNRVLVNATINREKNNVFASTLFASKMAATWRKWHEAGLISGRKLRNLMLRPDEIDKFAHGFVARQLVETRQIIKLTEQIAAAQYPNTKIIAVKAGLSHQLREELDFPKNRDVNHYHHAFDAFLAARIGTYLLKRYPKLAPFFTYGEFAKVDVKKFREFNFIGALTHAKKNIVAKDTGEIVWDKERDIQELDRIYNFKRMLITHEVYFETADLFKQTIYAAKDSKERGGSKQLIPKKQGYPTQVYGGYTRENTAYLAVVKTVEKKADVYRVVRIATSQVAALKEARAQSTVKERELLKKFLTTKFTKIGKNGKKAITPFDIVIPRVPREQLFHNKRYGFFMVNSDTLMHNYQELWMSRSDQQILSKLVKSAKTVENGQVGRLFENIVEQINKYFPLYDINQFRKKLDQSKDIFSKLPLEGNGTTSGKRETIQNILTGAGTGAKNGDLKNLGIKTPFGFLQVPSGIVLDDDTTLIYQSPTGMLNRIVRLSEL

SEQ ID NO: 1043 - protein, 1352 aa, Lactobacillus ruminis
MNDNFDLMRVKGKKGIGVRLYNEGQSAAERRMHRTARRRYGRRKWRLRLLEDFFDEHMAEVDDTFFARLKDSNISPKDDKKYRKSLLFPKSKGVTYQDDGEFYKKYPTMYHLRYALMTEHRKFDLREIYLAFHHMVKYRGNFLYDTSVDSFEAKNLDIKGKFDEINDLLSSYTDFYVDNSNAALVESILLEKNTTRKDKSKKIAKLLHVEDKEKGKNKKAKDLATQISNAVLGLKCNFHLIFELQQKYSFDLCSEKTEENIAKLSEVLDENQKMLLMILKEVQDQVMLNAFVPSGMSLSEAMMQKYDDYGEQLKIYHELEHSVSDDSAAKLRGAYRDYNDNIIKRIDGDNKKDTFYKRVKNILTKISKEYVDQDVLESCGKLKKLIDENKLFIRQRTAANGVLPHQLHQIEMRKIIDNQKEYYPWLAEPNPNEKRRVYSKYKVEELIAFRIPYYVGPLVDPNNADKNKEARFSWMVRKKDGEITPWNFYDKVDWAESANNFIERMKSKDTYLLGEDVVPKESMLYQKYEVLNELNNLRINDSGLSDSFEDVKLKQAIYNDLFKKQKIVKITDLQNYLVQNHKYLVKPKISGLADENRFLSSLSTYSDLKTIFGDKVDDRTYFNDFEKMVEYSTVFEDGHDYNQKLDEYTWLTKEEKYKIGKKRYRGWGKLSKKLLTGLRDKNNHTIMDNLWETNRNFMQIQTADEFSKQIAEENERHLKGSVSDAINDMYTSPANKKAIRQVLRVVDDIQKAMGYAPSSISLEFAREDGPSVRTVSRANRMKSIYEKYASEVSEEVMKDLDGVIKDKKGLNDRLYLYFEQQGKDMYSGHPLDFDKVISGQEYDIDHILPQAVIKDDSLDNRVLTTKALNNDVKSKGVPCRMFNGMHSFWKNLYDKGFISRRKFNNLTTNPENIDKYKMKGFVNRQLVETRQIIKLVANVLNDKYQNDDVDIIEVRAELTHDVRKHFKFYKNRNVNDYHHAFDAYLTSFIGHYLFKKYPNLRPLFDYNDFMKVSDNVFKQLRGNNFLGEFLNKTGDIISTDGNFVLNKEEMINKLNKAYAFKKILVTKEVGQRTGAMFNETRYPAPNSRKAALKYRRMPKPDSLISVKDYKNTDIYGGYSGKNDAYMVIVDMGKQYMVVGVPVRYTEKLDKLRIKHSELYRDELRKVLSRDKTLLDSKGNVKRFDIVLDRVLYGQLIEDGNELFTLGSSKYKRNFRQLFLDKQCIEILDSSATPQPTDEELIWVYDQILDKVDKYFELYDINRQRETLRKGRAAFCSLPNISMKKDDVTKKKILNEILVALHANESESNCEKIGKKVFGRLQVPGGIKLSKEAKLIYQSPTGLFERVVYLKDL

SEQ ID NO: 1044 - protein, 1339 aa, Lactobacillus salivarius
MERYHIGLDIGTSSIGWAVIGDDFKIKKKKGKNLIGTRLFNEGATAAERRGFRTQRRRLNRRKWRLKLLEEIFDPYMAEVDEYFFARLKSSNLSPKDSNKKYLGSLLFPDKSDSNFYDKYPTIYHLRRDLMEKDEKFDLREIYLAIHHIVKYRGNFLEKVPAKNYKNSGASIGFLLEEVNSLYKDIIGDESIAILNSEKFEDVEKIILDEETRNLDKQKSVGKLLVEDKKKKNIVTAFSKAIFGYKFNIEDLLLIENDEKNKLTFNDENIDDIFNELSHSLDDKQMDLLTKTREIYFKFKLNMIVPTGYTLSESMIEKYEMHKAHLKMYKEFINTLNTKDRKILKNAYSDYINTEKAKAANAQENFYKTVKKIIKDNNSDTAKKIIVLIDEGNFMPKQRTGENGVIPHQLHQIELDRIIENQAKYYPWLAEANPVEKNRKFAKYKLDELVTFRVPYYVGPLIDKTESNKNEKETKFAWMVRKAKGTITPWNFENLVDRTESANRFIKRMTSKDTYIIGEDVLPASSLLYEKFKVLNELNNIKVNEKKLDIEQKQDIYLNLFTTAKNVTKKSLATYLNCSADSISGLSDGEKFNSSLSSYIDLKAILGNIVDDCNKNEDLEKIIEYSTVFEDGNIYKEKLSEISWLTDEQIEKLSNIHFKGWGRLSKKLLTQITNENGERIIDALWNTSNNFMQIINDESIQAKLAEINGKYAGKSDLEDILSEAYTSPQNKKAIRQVMKVVEDIEKAMQCEPTSISIEFTRKKQKSRLTNTRYKKISDVYEKIADEVISEYELRKLQSELDSNANNMRDRYYLYFMQLGRDMYTGEKINIDELHQRYDIDHILPQSFIKDDSINNRVLTRKDVNNKEKSDKTAADLYAVEMSDFWRKLRKQGLITEQKYKNLLTKSDSIDKYAKKGFIKRQLVETSQVVKLVANILQDKYSDTKIIEVRAKLNSNLREEYKLIKNRAVNDYHHAIDGYLTTFIGQYLYKTYPKLRSYFVYNDFKKLDSNYLKHMKKFNFLWQLQDDKTIDIYDNVNNKFVLNVPEMKKYIQKIYNYKYMLVSKEVTTKNGAFYDQTKYNAKTVNLIPIKKNKPTNIYGGYKGKVSSYMMLVKIRKKKEVIYKFVGVPRLWTDELDRLKDTTERKILLNEIAKNSLSKTEQDFEVILDKVYYGQLIIDGNQKYTLGSSEYKYNAMQLHLSKHALEVLAKENVKDAEITDKDLVSVYEEILSVVNKYFELYDINKFRQKLNEGLEIFRKLPVYNVYESNKIKQVGKFEVLNRILMGLHANAMITDLKVLGIKTKLGQMQVNGGIKLSPDAKLIYQSPTGIFSRAVRVKDLG

SEQ ID NO: 1045 - protein, 629 aa, Lactobacillus salivarius
MERYHIGLDIGTSSIGWAVTGDDFKIKRKKGKNLIGTRLFKEGNTAAERRGFRTQRRRLNRRKWRLKLLEEIFDPYMAEVDEYFFARLKDSNLSPKDSNKKYLGSLLFPDISDSNFYDKYPTIYHLRRDLMEKDEKFDLREIYLAIHHIVKYRGNFLENVPAKNYKNSGASIGFLLEEVNNLYKDIVGDENVTILNSEKFEDVEKIILDDGIRNLDKQKGVGKLLVEDKKNKNLVTAFSKAIFGYKFNIEDLLLVEGDEKSKLTFNDENIDDIFNELSHSLDDRRMDLLTKTREIYFKFKLNMIVPTGYTLSESMIEKYEIHKAHLKMYKEFINTLNSKDRKILKNAYTDYINNEKAKAANAQENFYKTVKKTIKDNDSDIVKKIIDLIDEGNFMPKQRTGENGVIPHQLHQIELDRIIENQAKYYPWLAEENPVEKNRKFAKYKLDELVTFRVPYYVGPLVDKTESNKNEKETKFAWMVRKSKGTITPWNFENLVDRTESANRFIKRMTSKDTYIIGEDVLPASSLLYEKFKVLNELNNIKVNEKKLDIEQKQNIYLKLFTTTKNVTKKNLATFLNCSIESISGLSDDKKFNSSLSSYIDLKVILGDIVDDYSKNEDLEKIIEYSTIF

SEQ ID NO: 1046 - protein, 897 aa, Lactobacillus salivarius
  misc_feature (822)..(822): Xaa can be any naturally occurring amino acid
MLIESDEKNKLTFNDENIDDIFNELSHSLDDNQMDLLTKTREIYFKFKLNMIVPTGYTLSESMIEKYEMHKAHLKMYKEFINTLNAKDRKILKNAYSDYINNEKAKAANAQENFYKTIKKTIKDNNSDTAKKIIGLIDEGNFMPKQRTGENGVIPHQLHQIELDRIIENQAKYYPWLAEENPVEKNRKFAKYKLDELVTFRVPYYVGPLVDKTESNKNEKETKFAWMVRKAKGTITPWNFENLVDRTESANRFIKRMTSKDTYIIGEDVLPASSLLYEKFKVLNELNNIKVNKKKLDVEQKQHVYLDLFTTRKNVTKDNLATSLNCDVESITGLSDNEKFNSSLSSYIDLKAILGNAVDDCNKNKDLEKIIEYSTIFEDGNIYKEKLSEISWLTDEQIEKLSNIHFKGWGRLSKKLLTQITNENGERIIDALWNTSNNFIQIISDESIQAKLAEINGEYADKSNLEDILDEAYTSPQNKKAIRQVMKVVEDIEKAMKCKPTSIAIEFTRRKGKSKLTNTRYKKISETYEKITDELISEYELGKLQSKLDSKANNMRDIYYLYFMQLGRDMYTGEKINIDELHQYYDIDHIFPRSFIKDNSLNNRVLTRKEINNNEKADRTAADLYAVKMGDFWRKLRKQGLITEKKYKNLLTRTDSIDKYTKQSFIKRQLVETSQVVKMAANILQDKYSNTKIIEVRARLNSDLRKEYELIKNREVNDYHHAIDGYLTIFIGQYLYKTYPKLRSYFVYDDFKKLDSNYLKHMDKFNFIWKLEDKKAEDVYDNVNNEFILNVPKMKDYIQKIYNYKYMLISKEVTTESGAFYXZTKYNAKTINLIPIKKDKPTNIYGGYKGKVSSYMMLVKIQKKKEVIYKFVGVPRLWTDELDRLIDTDEKKALLKK

SEQ ID NO: 1047 - protein, 1419 aa, Lactobacillus sp.
MAKPQNYTIGLDIGTNSVGWTVTDDQNNILRIKSKKAIGARLFEEGKVAAERRSFRTTRRRLSRRKWRIKLLEELFDEEISKVDPNFFARSHESWISPKDKRERYSAIVFPTPEEDKKFHNEYPTIYHLRDRLMKDDQKHDIREIYVAIHHIMKYRGNFLHDESIETYRSGMSSLGGGDERTILNTKILDDLNDAFADNLATQGISVNSASADQINEIVTSGHLNVDSQKAIAKLLLPTTLSSDDKKQDKKIKKLATDAAKNVASAWLGYKANFAAILNIQEVDKDKKKIYSFALQGADEEDKVETLESVLSQDQIEIVDRIIRIRHAIVLGEIIPVGMTLSEAMIEKYDQHAKDLKNLKTVIRNLKDRKNAVKLQAIYDLYVNNRHADTAKAMKLAGVKKRTELLEPEEFNKSIEKLLDDSPVSAEIKKRIAEKDFLPLQRSNSNGVIPNQLHQIELDEIIKKQSKYYPFLGETNEHASADVARKAPTKLDQLLTFRVPYYVGPLITKEEQEEQDGHSFAWMIRKNPKDHEKITPWNFDEKVDRMASATQFIKRMTTKDTYLLGEDVLPSSSLKYQLFTVLNELNNLRINHKKLTREEKEQVIEDLFKKYKTVKADKFKNYWQKGHAGLDVKIQGMADPEKFNSTMSTYIDLQKIFGDQLDDAQRQNDFEKIIEYSTIFEDRKILGEKLRADFVWLSEDQIKRLCRLRLQGWGRLSLKLLTRLTDADGQNVLERLLNSNDNFMQIVKDPVIKAKIEQKNQKLLRADWSENATESILDEAYTSPQNKKAIRQVMRVVHDIVKACDGNLPAKFAIEFARSQDDDPKRTVARADRLQKIYAQISDEVVSQGVKDQLSGMKSLKDRYYLYFMQGGRDAYTGKPLNIDRLSDYDIDHIMPQSFIKDDSLDNRVLVTRAVNNQKSDNVPVLLYGNHLVADLGITIREMWDRWQKSGMISKRKLANLLTDPATLSEYRAEGFINRQLVETSQVIKLTATILQSEFPDSKIIEVPAKYNSILRKQFDLYKSREVNDYHHAIDAYLSTIVGNYLYQVYPNLRRLFVYGEFKKFSHGEEESSHQAVRRVKSMNFLDDLLRGKHGDDIYCRVTGEVIFSRKDIISKLKQAYSFKQMLVTQEVFTKKSALFDQTVYPSPARDSKTRSGLIPRKQGMDTEIYGGYSGNKDAYFVLAQVVKSKGHTLQVVGVPIRALRALANCSNYSEQLLKIVKAQVLFNKKTGKAKKGISDVRILLDKIPYRQPVLDGSAFYMLGSSTYKYNLKQISLSQQSMKYILDYIDDPNFNKHEMTKIDQQNEKECLLSVYDEILDKMDKYLSLYDINGFRKKLHVGRDKFIKLEVEKQAEAIKNVLRGFHANSDMTKLSDLGLSTSLGFMQASDGIKLSDNAVFIYQSPTGLFERRVKVSDLLK

SEQ ID NO: 1048 - protein, 1289 aa, Lactobacillus versmoldensis
MRRRYRRRRNRLNWLDELFADELAKIDPSFLLRMKNSWVSKKESTRKRDPYNLFIDEKYNDVDYFNQYPTIFHLRKELITEDKKVDIRLIYLAIHNIIKYRGNFTLENQNFDISQLSSNFSQQISDFFALFSDFGVIMPEDFDPDKISDILLNPNLSPSGKVSEAIATISPKTNVKAKIKIILLLLVGNNGDLKKLFDLETTEKIAVKLSSRHIDSELPIILSELNEQQENIITIANSIFGSIILKDFLGDETSISAAKVISFEDHKQDLQKLKTMWRETSNKEAVKAGKKAYEDYIGHEDSETFYKKIKKFLEKAQPVDLANKALAEIELENYLPKQRNRNNTVIPYQLNENELIAILDHQEKYYPFLKENRDKILSLLTFRIPYYVGPLQDSNNNRFSWMTRKASGAIRPWNFSEKVNVEQSSNDFIKRMRSTDTYLIGEPVLPKKSLIYQCYEVLSELNNTRVKDGSSNPKRLDVTIKQRIYNEIFKNQKSVSVKVLQNWLIKESYFKSPEISGLADKKKYLSSLSTYIDFKKIFGQRFVDDPVNSPQLEELAEWLTLFEDKKILLIKLQNSKYSYDQATINKLSTMRYQGTGKLSKKLLVDLKTTKKSIGKSGAESLSILDLMWSTKDNFMQIIHDADYTFEQQIKEFNYDTEDELTPLEKVANLHGSPALKRGLNQSIKVVADIVKFMGHDPEKIFIEFTRSDDFSKLTISRYRRIKKQYLEIAKAIKKIPAEFKDIKEYQTQLEENKGKLASERLMLYFLQCGHSLYSNKPIDLNMINSSKYHVDHILPQSYIKDDSLENKALVLASENENKIDNMLISHDIIATNLPRWQALKDQNLMGSKKFADLTRTTVTENQKKGFIQRQLVQTSQIVKNITLILNDLYKNTSCIETRATLSSEFRKAFSNFDETTYHYQFPEFVKNRDVNDFHHAQDAFLACVIGEYQLKKYPKDNLRLVYDQYSKFLDSLKKDTRKKNGRMPRYTQNGFIIGSMFNGKTYVDDNGEIIWDQKIKESIRKTFNYHQFNVVRQTIEQHGKLFNDTIQPHSDRYKLIPLKTNRDPAIYGGYNNDNNAYSVVLDVDGKKKINGIPIRIANQLKSDELDLSSWLENNIKHKKPMTILIDKVPKYQRIINEETGDLLITSANEVINNVQLFLPSMYTALISLLDSTKTEMYSKLLSNYEANILIDIYDYLLTKLKNNYPLYRKEWAKLAEHRDDFIESDLVTQASTLQQLIKFMHADPSNVNLKFGNFKGNRFGRKNGNIKLSKTDFIYESPTGLFKSIKHID

SEQ ID NO: 1049 - protein, 1372 aa, Legionella pneumophila
MESSQILSPIGIDLGGKFTGVCLSHLEAFAELPNHANTKYSVILIDHNNFQLSQAQRRATRHRVRNKKRNQFVKRVALQLFQHILSRDLNAKEETALCHYLNNRGYTYVDTDLDEYIKDETTINLLKELLPSESEHNFIDWFLQKMQSSEFRKILVSKVEEKKDDKELKNAVKNIKNFITGFEKNSVEGHRHRKVYFENIKSDITKDNQLDSIKKKIPSVCLSNLLGHLSNLQWKNLHRYLAKNPKQFDEQTFGNEFLRMLKNFRHLKGSQESLAVRNLIQQLEQSQDYISILEKTPPEITIPPYEARTNTGMEKDQSLLLNPEKLNNLYPNWRNLIPGIIDAHPFLEKDLEHTKLRDRKRIISPSKQDEKRDSYILQRYLDLNKKIDKFKIKKQLSFLGQGKQLPANLIETQKEMETHFNSSLVSVLIQIASAYNKEREDAAQGIWFDNAFSLCELSNINPPRKQKILPLLVGAILSEDFINNKDKWAKFKNFWNTHKIGRTSLKSKCKEIEEARKNSGNAFKIDYEEALNHPEHSNNKALIKIIQTIPDIIQAIQSHLGHNDSQALIYHNPFSLSQLYTILETKRDGFHKNCVAVTCENYWRSQKTEIDPEISYASRLPADSVRPFDGVLARMMQRLAYEIAMAKWEQIKHIPDNSSLLIPIYLEQNRFEFEESFKKIKGGSSDKTLEQAIEKQNIQWEEKFQRIINASMNICPYKGASIGGQGEIDHIYPRSLSKKHFGVIFNSEANLIYCSSQGNREKKEEHYLLEHLSPLYLKHQFGTDNVSDIKNFISQNVANIKKYISFHLLTPEQQKAARHALFLDYDDEAFKTITKFLMSQQKARVNGTQKFLGKQIMEFLSTLADSKQLQLEFSIKQITAEEVHDHRELLSKQEPKLVKSRQQSFPSHAIDATLTMSIGLKEFPQFSQELDNSWFINHLMPDEVHLNPVRSKEKYNKPNISSTPLFKDSLYAERFIPVWVKGETFAIGFSEKDLFEIKPSNKEKLFTLLKTYSTKNPGESLQELQAKSKAKWLYFPINKTLALEFLHHYFHKEIVTPDDTTVCHFINSLRYYTKKESITVKILKEPMPVLSVKFESSKKNVLGSFKHTIALPATKDWERLFNHPNFLALKANPAPNPKEFNEFIRKYFLSDNNPNSDIPNNGHNIKPQKHKAVRKVFSLPVIPGNAGTMMRIRRKDNKGQPLYQLQTIDDTPSMGIQINEDRLVKQEVLMDAYKTRNLSTIDGINNSEGQAYATFDNWLTLPVSTFKPEIIKLEMKPHSKTRRYIRITQSLADFIKTIDEALMIKPSDSIDDPLNMPNEIVCKNKLFGNELKPRDGKMKIVSTGKIVTYEFESDSTPQWIQTLYVTQLKKQP

SEQ ID NO: 1050 - protein, 907 aa, Leptospira inadai
MAKSIEEIRSIQNEFVVEYSILLKKIKKGEIDKKNDVYKVYQNTIKSSERLEQVLKERLGFQNVSKSYFNNPYSIAQLYNLISVDRSGFSKVCRSCQEENHWRSTLIDTDRGPQAQASKQVSDTGRPFDGQLAMLLDRIAFEIVKLKRIEIERLLSNKNSSKIEVVEIPLLIEENSFNFRYELAELKKLSKKKKDQLKKSVEEFDTKLNSKQERIKAASRELCPYTGKKISKGEIDHILPRSWTQKQFGTALNAEANLIYASREGNQSKGNREYGLNDLDEKYLNIIFGTKEVDSIQRNISDTIDRLDIERGTTRIVFDRLAPNERDCLRHALFIKSLRPKVFELLSGQLKARVNGTQLYLAKRIRSLLLKNQDFITKSLIIKVPSFSFYEPRTVDLPYMRKELAEKFPNLGKQNPQPTGSHIIDAAMVMAYAVETDSGNLSFGSKDKSEGFDSESLSRFLPSNIQFLSIKSKDKTDSKYPYKKPLFKDGVFGERFLPILIAEKGLRVGYTLENSLEVNSENPEEFFNVLKPYLLFKRKPIESNYQTLVAFAQKDKRGYIVLPVNKPKALESISQRKSDPHTSILKNILYTVSRESIPSLIFDKNTLIPEIKSNKVNWGDKLEKKFRIKIEIKLYGKKIADGFIRYPGKTEWEKLLLTEPLKGLVKNKTLTPKWFDSLENLAGLDDHFKDTSNPEAKHKRKSNHYALPVPKGPSGGFRIRRNSFDGYKVYQLYSVDGNSFHAFKIENGWTGKTLLLDIYQNSGNLHSLDYDYENTDISQTALFSKFYKIEFSKEETQKINSKGIKSLYVAPGSSSRQYIRVIFDKQTFSKFIKFQSKFWEFDLITPLPKDKAKDLIESILKIFPEDLRPKKPRNDIHIQNISHDSVQVEYIADGKTQGFGQYFINQN

SEQ ID NO: 1051 - protein, 418 aa, Leptospira inadai
MILKSPIAIDLGAKNTGIVYTTYQPNALPTEIHGATIISDNLKLSQVDRRAKRHQRRNYTRMKLARRLVYLIIRYHYRIPEQDLTPEVKTSLQSLLTRRGYTFQSIETEGNELGQAPWGEIEDYFPNVQDYEKSLPIQTVLYHFFSSENLELNKLVPSKEPETKEDKNILKYIREQKEAFESEQNNGARHRLKYFEEIKEDFPRKIKLMECLQKNKIEEKKFLNLIQNISNLQIKPLRAYFNDKDMKEKEIWEPRRLHTYIARWIRSWHIDPKNSSKRLIRQKLLSQLENGKLKIIRDTSIYSPSKDIISFLEEIDPKDTIPPYEDQNNRHPPRCQNLWLDGKILDRYFPGWEQSLWKLIRNEKNNPFEQLITKDFRTDDTISEGKSLSEQIQIYERSHSNIKLDVRAVILQRFLDRS

SEQ ID NO: 1052 - protein, 125 aa, Leptospira inadai
MSAYDRSANLDPWSLRLQGKAKKEIKTTESLSKTDLQKASDAYEKIKEILSESDTDQFIKLANRYYLEVADIKKGMWLPTAPERKHKEIPKSIAHEENQDISLFHKCNTKTGSKKRISQVSLEMF

SEQ ID NO: 1053 - protein, 1355 aa, Leuconostoc gelidum
MTYSIGLDIGTGSVGWAVIGDDYRLKRAKGKNLIGVRLFDSATTAAERRGYRTTRRRLSRRHWRLRLLNDIFASDLAEQDENFLPRLKYSWVNPDDEQNPQLNSDVANGALFGSSETDKAFHKNYPTIYHLRHELMTDTAKHDLREVYLAIHHIVKYRGNFLNTADKINAENSFNVDLFIAALDEYNEFLETPITSIKDAQLFSDKLTDINARNKSVRVENAMSETYDDKSKIFKAILTALVGNTANFQTIFDLSDLEKDEAKNFKFKLDLEDVETKLDVVRAKLSDEQNAFLEAVLIAYDGITLKMILGDYKSISQSMIESYKSHQRDWKYIKNNVRLNEQKIEPDKNSVKFFKLDPKKLIYPSNLAYLQVISSNEDEHRKGLDYFKTAIQDADILQRIENDTFLPRQRTKRNGVLPYQLHLAELEQIIKKQSKYYPFLANIYTQDNKTENKLIGLLKFRVPYYVGPLVEAEKVTGDGKNHWLIKKELQENTPITPFNFDDVVDKDKSGEQFIKRITGTDSYLIGEPTLPENSLLYQKYNVLQELNNVRNERHQRLPIKVKQDIFEHVFKIDKNVNAKKVMAYLKLNGYGDFQIAGLSDTRTGKFNSNLSSYNYFVDLLGREKTEKIREDRLEEIIEIQTVFEDKILVAKRLSNLDFLTPQEKSKLSAKHYTGWGRLSQKLLTTQFIKTALSEAGDIIPQSHSIIDLLYYTDKNLMEILNDKTFNVRNWLTEQNKGTESGNSLYDQIDALAGPKDIKRGITQVFSIIDDIKKAMGSNPETVYLEFARETQTSRLTNSRLNRVQEIYNSPELKTEFAYLAKKLEAETKESIHDDRLYLYYLQEGRDMYTGKEIPFDQISSNYDIDHIIPQAFTKDDSLDNRVLVNRATNARKSNSPTFTNDIIDNRKSWWQSLVKRGLMSKEKFERLTDKRKTFSENQTNHFIARQLVETRQIIKNVADLIKNNYDGTQAVAIRASLTGEMRRYLDWPKNRDMNDYHHAHDALMMATVGKYVDRRGFFDNGSVSDGAGNAYNLYTKDWLVAARVGTRNDSQRVNPYGFIVGSMNSKAVRQQVNKETGEIVWGNENLDYLRHVLSYKKILVTRRLSGSSGRLYAETLFSPNPKAKLIAQKANRSVALYGGFTKAESAYTALVEFNKKGDRSYKLIKVPMAIANRVNDKQITVTAYIASLNLRDFSRVVLEHLPLGTLIRESDGSEFYAASSEYKHNAKELWAPKEILRSSKKLDKATADNLIDIFDFLTNDKTISNFKFYEKDLLHLKNVRDKFVEASDEIKIKVLSDVIYELHNDAGWRDPFKHIQEKPAWTMLQVKGGIKLSEKAAIVYQSPTGLFETITIVGE

SEQ ID NO: 1054 - protein, 883 aa, Leuconostoc pseudomesenteroides
MIGVRLFEGADTAAERRGYRTTRRRLSRRRWRLRLLNDIFASELSKIDENFLPRLKYSWVNKNDTDNVHFGVGVFDNSEQEKAFYQDYPTIYHLRQKLMTDNRQHDLREVYLAIHHIVKYRGHFLNSGEISANSSFDAQKFLELLREFDNTFYPDAVKFLNLDQLDLPDKISSEISDSKISKSERVDRVLQHVQLANSGAKKILKAILNAVVGNSVDSVAMFSLSDLDKEEKKKINHPVTDSKPFKYSDKEVEAKLDELSNLLQDEQKIEFLSLLKLSFDGLTLKMLLGNAKSVSEAMVERYKVHKDDLKFIKENILNSFSKDKKKEFDKYYEAHLAEKDVDNVDKYFKKIIDDSIISKDKKIELLQKIDDHDFLPSQRSKINGAIPHQLHRNELDKIISQQSKYYPFLADSYTQNGKTETKLAGLVNFRVPYYVGPLVSKENADRNNPDGGQNHWVEFKENTSLSNLTPWNFNEIVDKDKSAAKFIERLTGMDTYLIGEPTLPQNSLLYQKYNVLQELNNIRVDNHKLDVKIKQDVFEHLFKTQNSVSAKDVKNYLIANGYAAPSIQITGLSDTNEKTFNSKLSSYNYLVDKLGRTFVESVKSDVLEKIIELQTVFEDKTVLLRQLSMISELTLAQANQLAEKHWTGWGRLSRKLLSSKVVDVNKITNSTFYPATSRQTIIDTLYHTQLNLMEIINNAEDLYGVRQWISEQNKSDSSDTNDVYDQIQELAGDKKIKRGITQSFRILDDIVKAMGGEPERVYLEFARENQQSGVSFSRKNLLSKLYENDSLKQTFKELKSQLESETKENLQNDRLYLYYLQQGRDMYSNDELNIDQLSSYDIDHIIPQAYTKDNSFDNRVLVSSKANRLKRMLLWYPVKLSKK

SEQ ID NO: 1055 - protein, 468 aa, Leuconostoc pseudomesenteroides
MKDQGFISKRKFENLTRRGDFSEQQKERFIARALVETRQIIVNVSSLIDSHFNHTKAVAVKSNMTTDMRHYTKVPKNRDINDYHHAHDALFVATVGQYIENKGFMKAGKLSDSVGNEYNRYTKKWIETARKNTNYGRVNPFGFVVGSMQTATRGKLDYETGELKVVKNNYWSKDDLDYLLKVVSYKKILVTTKLQDNKGAMYDANLISAKGSGKKKAQLQISKSKNIDLYGGFNKLQNEYSVLILNHDEYRWLSIPMYARNSSEQYLHDKYPDAKVILNHILVGQPILLSNSSDPQKSKFASLRIATGGDYHNNFEFVPSVDVKKILDNIYLNHSVTDDEYKKVFESLLATLHDKFVFGIHQVMYNKIFDNKYLFDKMPDEAKRNVINSLLKFMNISKNQLGAVGKIGGKVNGVLYGFKTETEKGTSAGQLISNGKMQPHDIFIFQSPTGIFERRVTVAELANVIKDE

SEQ ID NO: 1056 - protein, 1103 aa, Listeria innocua
LKLYPGEKSTGMFAQFISLIVGSKGNFQKPFDLIEKSDIECAKDSYEEDLESLLALIGDEYAELFVAAKNAYSAVVLSSIITVAETETNAKLSASMIERFDTHEEDLGELKAFIKLHLPKHYEEIFSNTEKHGYAGYIDGKTKQADFYKYMKTTLENIEGADYFIAKIEKENFLRKQRTFDNGAIPHQLHLEELEAILHQQAKYYPFLKENYDKIKSLVTFRIPYFVGPLANGQSEFAWLTRKADGEIRPWNIEEKVDFGKSAVDFIEKMTNKDTYLPKENVLPKHSLCYQKYLVYNELTKVRYINDQGKTSYFSGQEKEQIFNDLFKQKRKVKKKDLELFLRNMSHVESPTIEGLEDSFNSSYSTYHDLLKVGIKQEILDNPVNTEMLENIVKILTVFEDKRMIKEQLQQFSDVLDGVVLKKLERRHYTGWGRLSAKLLMGIRDKQSHLTILDYLMNDDGLNRNLMQLINDSNLSFKSIIEKEQVTTADKDIQSIVADLAGSPAIKKGILQSLKIVDELVSVMGYPPQTIVVEMARENQTTGKGKNNSRPRYKSLEKAIKEFGSQILKEHPTDNQELKNNRLYLYYLQNGKDMYTGQDLDIHNLSNYDIDHIVPQSFITDNSIDNLVLTSSAGNREKGNDVPPLEIVQKRKVFWEKLYQGNLMSKRKFDYLTKAERGGLTEADKARFIHRQLVETRQITKNVANILHQRFNYGKDDHGNTMKQVRIVTLKSALVSQFRKQFQLYKVRGVNDYHHAHDAYLNGVVANTLLKVYPQLEPEFVYGDYHQFDWFKANKATAKKQFYTNIMLFFAQKDRIIDENGEILWDKKYLDTVKKVMSYRQMNIVKKTEIQKGEFSKATIKPKGNSSKLIPRKTNWDPMKYGGLDSPNMAYAVVIEYAKGKNKLVFEKKIIRVTIMERKAFEKDEKAFLEEQGYRQPKVLAKLPKYTLYECEEGRRRMLASANEAQKGNQQVLPNHLVTLLHHAANCEVSDGKSLDYIESNREMFAELLAHVSEFAKRYTLAEANLNKINQLFEQNKEGDIKAIAQSFVDLMAFNAMGAPASFKFFETTIERKRYNNLKELLNSTIIYQSITGLYESRKRLDD

SEQ ID NO: 1057 - protein, 1337 aa, Listeria innocua
MKNMKKPYTIGLDIGTNSVGWAVLTDQYDLVKRKMKIAGDSEKKQIKKNFWGVRLFDEGQTAADRRMARTARRRIERRRNRISYLQGIFAEEMSKTDANFFCRLSDSFYVDNEKRNSRHPFFATIEEEVEYHKNYPTIYHLREELVNSSEKADLRLVYLALAHIIKYRGNFLIEGALDTQNTSVDGIYKQFIQTYNQVFASGIEDGSLKKLEDNKDVAKILVEKVTRKEKLERILKLYPGEKSAGMFAQFISLIVGSKGNFQKPFDLIEKSDIECAKDSYEEDLESLLALIGDEYAELFVAAKNAYSAVVLSSIITVAETETNAKLSASMIERFDTHEEDLGELKAFIKLHLPKHYEEIFSNTEKHGYAGYIDGKTKQADFYKYMKMTLENIEGADYFIAKIEKENFLRKQRTFDNGAIPHQLHLEELEAILHQQAKYYPFLKENYDKIKSLVTFRIPYFVGPLANGQSEFAWLTRKADGEIRPWNIEEKVDFGKSAVDFIEKMTNKDTYLPKENVLPKHSLCYQKYLVYNELTKVRYINDQGKTSYFSGQEKEQIFNDLFKQKRKVKKKDLELFLRNMSHVESPTIEGLEDSFNSSYSTYHDLLKVGIKQEILDNPVNTEMLENIVKILTVFEDKRMIKEQLQQFSDVLDGVVLKKLERRHYTGWGRLSAKLLMGIRDKQSHLTILDYLMNDDGLNRNLMQLINDSNLSFKSIIEKEQVTTADKDIQSIVADLAGSPAIKKGILQSLKIVDELVSVMGYPPQTIVVEMARENQTTGKGKNNSRPRYKSLEKAIKEFGSQILKEHPTDNQELRNNRLYLYYLQNGKDMYTGQDLDIHNLSNYDIDHIVPQSFITDNSIDNLVLTSSAGNREKGDDVPPLEIVRKRKVFWEKLYQGNLMSKRKFDYLTKAERGGLTEADKARFIHRQLVETRQITKNVANILHQRFNYEKDDHGNTMKQVRIVTLKSALVSQFRKQFQLYKVRDVNDYHHAHDAYLNGVVANTLLKVYPQLEPEFVYGDYHQFDWFKANKATAKKQFYTNIMLFFAQKDRIIDENGEILWDKKYLDTVKKVMSYRQMNIVKKTEIQKGEFSKATIKPKGNSSKLISRKTNWDPMKYGGLDSPNMAYAVVIEYAKGKNKLVFEKKIIRVTIMERKAFEKDEKAFLEEQGYRQPKVLAKLPKYTLYECEEGRRRMLASANEAQKGNQQVLPNHLVTLLHHVANCEVSDGKSLDYIESNREMFAELLAHVSEFAKRYTLAEANLNKINQLFEQNKEGDIKAIAQSFVDLMAFNAMGAPASFKFFETTIERKRYNNLKELLNSTIIYQSITGLYESRKRLDD

SEQ ID NO: 1058 - protein, 953 aa, Listeria ivanovii
MKKMLANIDGADYFIDQIEEENFLRKQRTFDNGTIPHQLHLEELEAILHQQAKYYPFLRKDYEKIRSLVTFRIPYFIGPLANGQSDFAWLTRKADGEIRPWNIEEKVDFGKSAIDFIEKMTNKDTYLPKENVLPKHSLCYQKYMVYNELTKIRYIDDQGKTHHFSGQEKQQIFNGLFKQQRKVKKKDLERFLYTINHIESPTIEGVEDAFNSSFATYHDLQKGGVTQEILDNPLNADMLEEIVKILTVFEDKRMIKEQLQSFSDVLDGTILKKLERRHYTGWGRLSAKLLTGIRDKHSHLTILDYLMNDDGLNRNLMQLINDSNLSFKSIIEKEQVSTADKGIQSIVAELAGSPAIKKGILQSLKIVDELVGIMGYPPQTIVVEMARENQTTGKGKNNSKPRFISLEKAIKEFGSQILKEHPTDNQCLKNDRLYLYYLQNGKDMYTGKELDIHNLSNYDIDHIIPQSFITDNSIDNRVLVSSTANREKGDNVPLLEVVRKRKAFWEKLYQAKLMSKRKFDYLTKAERGGLTEADKANFIQRQLVETRQITKNVANILYQRFNCKQDENGNEVEQVRIVTLKSTLVSQFRKQFQLYKVREVNDYHHAHDAYLNGVVANTLLKVYPQLEPEFVYGDYHQFDWFKANKATAKKQFYTNIMRFFAKENQIIDKNGEILWDNRYLDTIKKVLSYRQMNIVKKTEIQKGEFSNATVNPKGNSSKLISRKADWNPIKYGGFDGSNMAYSIVIEYEKRKKKTVIKKELIQINIMERVAFEKDQKAFLEEKGYYSPKVLTKIPKYTLYECENGRRRMLGSANEAQKGNQMVLPNHLMTLLYHAKNCEANDGESLAYIEMHREMFAELLAYISEFAKRYTLANDRLEKINMFFEQNKKGDIKVIAKSFDKLKVFNAFGAPRDFEFFETTIKRKRYYNIKELLNATIIYQSITGLYEARKRLED

SEQ ID NO: 1059 - protein, 232 aa, Listeria ivanovii
MMSKLILGLDIGISSVGWGVLDESTNEVVDAGVRLFEEATRNGNEDRRGFRSARRLKRRRQHRLERAKGLIENNGFSCTDINKFNPYQARYNAIFGEVTKDELAAALFHLVKRRGTTIDAPEEEVKDVENELSTKMQLEKNAKKLATKYDYICEIQLEKLKENKVVRDHENRFRTEDYVKEARAILENQQEYYPEVTNEFIESYMALIETRRMYYDGPGSEKSPTPYGQYFI

SEQ ID NO: 1060 - protein, 300 aa, Listeria monocytogenes
DDGLNRNLMQLINDSNLSFKSIIEKEQVSTTDKDLQSIVADLAGSPAIKKGILQSLKIVDELVSIMGYPPQTIVVEMARENQTTVKGKNNSRPRYKSLEKAIKEFGSQILKEHPTDNQELRNNRLYLYYLQNGKDMYTGQELDIHNLSNYDIDHIVPQSFITDNSIDNLVLTSSAGNREKGDDVPPLEIVRKRKVFWEKLFQGNLMSKRKFDYLTKAERGGLTEADKATFIHRQLVETRQITKNVANILHQRFNNETDNHGNNMEQVRIVMLKSALVSQFRKQFQLYKVREVNDYHHAHD

SEQ ID NO: 1061 - protein, 782 aa, Listeria monocytogenes
  misc_feature (722)..(722): Xaa can be any naturally occurring amino acid
IFNDLFKQKRKVKKKDLELFLRNINQIESPTIEGLEDSFNASYATYHDLLKVGMKQEILDNPLNTEMLEDIVKILTVFEDKRMIKEQLQQFSDVLDGVVLKKLERRHYTGWGRLSAKLLVGIRDKQSHLTILEYLMNDDGLNRNLMQLINDSNLSFKSIIEKEQVSTTDKDLQSIVADLAGSPAIKKGILQSLKIVDELVSIMGYPPQTIVVEMARENQTTVKGKNNSRPRYKSLEKAIKEFGSQILKEHPTDNQELKNNRLYLYYLQNGKDIYTGQELDIHNLSNYDIDHIVPQSFITDNSIDNLVLTSSAGNREKGDDVPPLEIVRKRKVFWEKLYQGNLMSKRKFDYLTKAERGGLTEADKARFIHRQLVETRQITKNVANILHQRFNNETDNHGNTMEQVRIVTLKSALVSQFRKQFQLYKVREVNDYHHAHDAYLNGVVANTLLKVYPQLEPEFVYGEYHQFDWFKANKATAKKQFYTNIMLFFAQKERIIDENGEILWDKKYLETIKKVLDYRQMNIVKKTEIQKGEFSKATIKPKGNSSKLIPRKENWDPMKYGGLDSPNMAYAVIIEHAKGKKKIVIEKKLIQINIMERKMFEKDEEAFLEEKGYRHPKVLTKLPKYTLYECEKGRRRMLASANEAQKGNQLVLSNHLVSLLYHAKNCEASDGKSLKYTEAHRETFSELLAQVSEFATRYTLADANLSKINNLFEQNKEGDIKXIAQSFVDLMVFNAMGAPASFKFFEATIDRKRYTNLKELLSSTIIYQSITGLYESRKRLDD

SEQ ID NO: 1062 - protein, 1334 aa, Listeria monocytogenes; identical to SEQ ID NO: 109

SEQ ID NO: 1063 - protein, 1334 aa, Listeria monocytogenes
MKNPYTIGLDIGTNSVGWAVLTDQYDLVKRKMKVAGNSDKKQIKKNFWGVRLFDDGQTAVDRRMNRTARRRIERRRNRISYLQEIFAVEMANIDANFFCRLNDSFYVDSEKRNSRHPFFATIEEEVAYHKNYRTIYHLREELVNSSEKADLRLVYLALAHIIKYRGNFLIEGALDTKNTSVDEVYKQFIQTYNQVFMSNIEEGALAKVEENTEVASILAGKFTRREKFERILRLYPGEKSTGMFAQFISLIVGNKGNFQKVFNLVEKTDIECAKDSYEEDLEALLAIIGDEYAELFVAAKNTYNAVVLSSIITVTATETNAKLSASMIERFDAHEKELGELKAFIKLHLPKQYQEIFNNAEIDGYAGYIDGKTKQVDFYKYLKTTLENVEGADYFITKIEEENFLRKQRTFDNGVIPHQLHLEELEAILHQQAKYYPFLREGYDKIKSLVTFRIPYFVGPLANGQSEFAWLTRKDDGEIRPWNIEEKVDFGKSAVDFIEKMTNKDTYLPKENVLPKHSLCYQKYMVYNELTKIRYIDDQGKTNYFSGREKQQIFNDLFKQKRKVKKKDLELFLRNINHIESPTIEGLEDSFNASYATYHDLLKVGLKQEILDNPLNTEILEDIVKILTVFEDKRMIKEQLEQFSDVLDGVVLKKLERRHYTGWGRLSAKLLVGIRDKQSHLTILDYLMNDDGLNRNLMQLINDSNLSFKSIIEKEQVSTTDKDLQSIVADLAGSPAIKKGILQSLKIVDELVSIMGYPPQTIVVEMARENQTTGKGKNNSKPRYKSLEKAIKDFGSQILKEHPTDNQELKNNRLYLYYLQNGKDIYTGQELDIHNLSNYDIDHIVPQSFITDNSIDNLVLTSSAGNREKGGDVPPLEIVRKRKVFWEKLYQGNLMSKRKFDYLTKAERGGLTEADKARFIHRQLVETRQITKNVANILHQRFNKETDNHGNTMEQVRIVTLKSALVSQFRKQFQLYKVREVNDYHHAHDAYLNGVVANTLLKVYPQLEPEFVYGEYHQFDWFKANKATAKKQFYTNIMLFFAQKERIIDENGEILWDKKYLETIKKVLDYRQINIVKKTEIQKGEFSKATIKPKGNSSKLIPRKENWDPMKYGGLDSPNMAYAVIIEHAKGKKKIVIEKKLIQINIMERKMFEKDEEAFLEEKGYHQPKVLTKLPKYTLYECEKGRRRMLSSANEAQKGNQLVLSNHLVSLLYHAKNCEASDGKSLKYIEAHRETFSELLAQVSEFATKYTLADANLSKINNLFEQNKEGDIKAIAQSFVDLMAFNAMGAPASFKFFEATIDRKRYTNLKELLSSTIIYQSITGLYESRKRLDD

SEQ ID NO: 1064 - protein, 1334 aa, Listeria monocytogenes
MKNPYTIGLDIGTNSVGWAVLTDQYDLVKRKMKVAGNSDKKQIKKNFWGVRLFDDGQTAVDRRMNRTARRRIERRRNRISYLQEIFAVEMANIDANFFCRLNDSFYVDSEKRNSRHPFFATIEEEVAYHKNYRTIYHLREELVNSSEKADLRLVYLALAHIIKYRGNFLIEGALDTKNTSVDEVYKQFIQTYNQVFMSNIEEGALAKVEENTEVASILAGKFTRREKFERILRLYPGEKSTGMFAQFISLIVGNKGNFQKVFNLVEKTDIECAKDSYEEDLEALLAIIGDEYAELFVAAKNTYNAVVLSSIITVTATETNAKLSASMIERFDAHEKELGELKAFIKLHLPKQYQEIFNNAEIDGYAGYIDGKTKQVDFYKYLKTTLENVEGADYFITKIEEENFLRKQRTFDNGVIPHQLHLEELEAILHQQAKYYPFLREGYDKIKSLVTFRIPYFVGPLANGQSEFAWLTRKDDGEIRPWNIEEKVDFGKSAVDFIEKMTNKDTYLPKENVLPKHSLCYQKYMVYNELTKIRYIDDQGKTNYFSGREKQQIFNDLFKQKRKVKKKDLELFLRNINHIESPTIEGLEDSFNASYATYHDLLKVGLKQEILDNPLNTEILEDIVKILTVFEDKRMIKEQLEQFSDVLDGVVLKKLERRHYTGWGRLSAKLLVGIRDKQSHLTILDYLMNDDGLNRNLMQLINDSNLSFKSIIEKEQVSTTDKDLQSIVADLAGSPAIKKGILQSLKIVDELVSIMGYPPQTIVVEMARENQTTGKGKNNSKPRYKSLEKAIKDFGSQILKEHPTDNQELKNNRLYLYYLQNGKDIYTGQELDIHNLSNYDIDHIVPQSFITDNSIDNLVLTSSAGNREKGGDVPPLEIVRKRKVFWEKLYQGNLMSKRKFDYLTKAERGGLTEADKARFIHRQLVETRQITKNVANILHQRFNKETDNHGNTMEQVRIVTLKSALVSQFRKQFQLYKVREVNDYHHAHDAYLNGVVANTLLKVYPQLEPEFVYGEYHQFDWFKANKATAKKQFYTNIMLFFAQKERIIDENGEILWDKKYLETIKKVLDYRQINIVKKTEIQKGEFSKATIKPKGNSSKLIPRKENWDPVKYGGLDSPNMAYAVIIEHAKGKKKIVIEKKLIQINIMERKMFEKDEEAFLEEKGYHQPKVLTKLPKYTLYECEKGRRRMLSSANEAQKGNQLVLSNHLVSLLYHAKNCEASDGKSLKYIEAHRETFSELLAQVSEFATKYTLADANLSKINNLFEQNKEGDIKAIAQSFVDLMAFNAMGAPASFKFFEATIDRKRYTNLKELLSSTIIYQSITGLYESRKRLDD

SEQ ID NO: 1065 - protein, 1099 aa, Listeria monocytogenes
MKNPYTIGLDIGTNSVGWAVLTDQYDLVKRKMKVAGNSDKKQIKKNFWGVRLFDDGQTAVDRRMNRTARRRIERRRNRISYLQEIFAVEMANIDANFFCRLNDSFYVDSEKRNSRHPFFATIEEEVAYHKNYRTIYHLREELVNSSEKADLRLVYLALAHIIKYRGNFLIEGALDTKNTSVDEVYKQFIQTYNQVFMSNIEEGALAKVEENTEVASILAGKFTRREKFERILRLYPGEKSTGMFAQFISLIVGNKGNFQKVFNLVEKTDIECAKDSYEEDLEALLAIIGDEYAELFVAAKNTYNAVVLSSIITVTATETNAKLSASMIERFDAHEKELGELKAFIKLHLPKQYQEIFNNAEIDGYAGYIDGKTKQVDFYKYLKTTLENVEGADYFITKIEEENFLRKQRTFDNGVIPHQLHLEELEAILHQQAKYYPFLREGYDKIKSLVTFRIPYFVGPLANGQSEFAWLTRKDDGEIRPWNIEEKVDFGKSAVDFIEKMTNKDTYLPKENVLPKHSLCYQKYMVYNELTKIRYIDDQGKTNYFSGREKQQIFNDLFKQKRKVKKKDLELFLRNINHIESPTIEGLEDSFNASYATYHDLLKVGLKQEILDNPLNTEILEDIVKILTVFEDKRMIKEQLEQFSDVLDGVVLKKLERRHYTGWGRLSAKLLVGIRDKQSHLTILDYLMNDDGLNRNLMQLINDSNLSFKSIIEKEQVSTTDKDLQSIVADLAGSPAIKKGILQSLKIVDELVSIMGYPPQTIVVEMARENQTTGKGKNNSKPRYKSLEKAIKDFGSQILKEHPTDNQELKNNRLYLYYLQNGKDIYTGQELDIHNLSNYDIDHIVPQSFITDNSIDNLVLTSSAGNREKGGDVPPLEIVRKRKVFWEKLYQGNLMSKRKFDYLTKAERGGLTEADKARFIHRQLVETRQITKNVANILHQRFNKETDNHGNTMEQVRIVTLKSALVSQFRKQFQLYKVREVNDYHHAHDAYLNGVVANTLLKVYPQLEPEFVYGEYHQFDWFKANKATAKKQFYTNIMLFFAQKERIIDENGEILWDKKYLETIKKVLDYRQINIVKKTEIQKGEFSKATIKPKGIPAN

SEQ ID NO: 1066 - protein, 1334 aa, Listeria monocytogenes
MKNPYTIGLDIGTNSVGWAVLTDQYDLVKRKMKVAGNSDKKQIKKNFWGVRLFDEGETAADRRMNRTARRRIERRRNRISYLQEIFALEMANIDANFFCRLNDSFYVDSEKRNSRHPFFATIEEEVAYHKNYRTIYHLREELVNSSEKADLRLVYLALAHIIKYRGNFLIEGALDTKNTSVDGVYKQFIQTYNQVFISNIEEGTLAKMEENTTVADILAGKFTRKEKLERILQLYPGEKSTGMFAQFISLIVGSKGNFQKVFDLVEKTDIECAKDSYEEDLEALLAIIGDEYAELFVAAKNTYNAVVLSSIITVTDTETNAKLSASMIERFDAHEKDLSELKAFIKLHLPKQYEEIFSNVAIDGYAGYIDGKTKQVDFYKYLKTLLENIEGADYFIAKIEEENFLRKQRTFDNGAIPHQLHLEELEAILHQQAKYYPFLKEAYDKIKSLVTFRIPYFVGPLANGQSDFAWLTRKADGEIRPWNIEEKVDFGKSAVDFIEKMTNKDTYLPKENVLPKHSLYYQKYMVYNELTKVRYIDDQGKTNYFSGQEKQQIFNDYFKQKRKVSKKDLEQFLRNMSHIESPTIEGLEDSFNSSYATYHDLLKVGIKQEVLENPLNTEMLEDIVKILTVFEDKRMIKEQLQQFSDVLDGAVLKKLERRHYTGWGRLSAKLLVGIRDKQSHLTILDYLMNDDGLNRNLMQLINDSNLSFKSIIEKEQVSTTDKDLQSIVADLAGSPAIKKGILQSLKIVDELVSIMGYPPQTIVVEMARENQTTVKGKNNSRPRYKSLEKAIKEFGSQILKEHPTDNQELRNNRLYLYYLQNGKDMYTGQELDIHNLSNYDIDHIVPQSFITDNSIDNLVLTSSAGNREKGDDVPPLEIVRKRKVFWEKLFQGNLMSKRKFDYLTKAERGGLTEADKATFIHRQLVETRQITKNVANILHQRFNNETDNHGNNMEQVRIVMLKSALVSQFRKQFQLYKVREVNDYHHAHDAYLNGVVANTLLKVYPQLEPEFVYGEYHQFDWFKANKATAKKQFYTNIMLFFAQKERIIDENGEILWDKKYLETIKKVLDYRQMNIVKKTEIQKGEFSKATIKPKGNSSKLIPRKENWDPMKYGGLDSPNMAYAVIIEHAKGKKKVVFEKKIIRITIMERKAFEKDEKSFLEKQGYRQPKVLTKLPKYTLYECENGRRRMLASANEAQKGNQQVLKGQLITLLHHAKNCEASDGKSLDYIESNREMFGELLAHVSEFAKRYTLADANLSKINQLFEQNKDNDIKVIAQSFVNLMAFNAMGAPASFKFFEATIERKRYTNLKELLSATIIYQSITGLYEARKRLDG

SEQ ID NO: 1067 - protein, 1334 aa, Listeria monocytogenes
MKNPYTIGLDIGTNSVGWAVLTNQYDLVKRKMKVAGNSDKKQIKKNFWGVRLFDDGQTAVDRRMNRTARRRIERRRNRISYLQEIFAVEMANIDANFFCRLNDSFYVDSEKRNSRHPFFATIEEEVAYHKNYRTIYHLREELVNSSEKADLRLVYLALAHIIKYRGNFLIEGALDTKNTSVDGVYEQFIQTYNQVFMSNIEEGTLAKVEENIEVANILAGKFTRREKFERILQLYPGEKSTGMFAQFISLIVGSKGNFQKVFDLIEKTDIECAKDSYEEDLEALLAIIGDEYAELFVAAKNTYNAVVLSSIITVTATETNAKLSASMIERFDAHEKDLGELKAFIKLHLPKQYQEIFNNAAIDGYAGYIDGKTKQVDFYKYLKTILENIEGADYFIAKIEEENFLRKQRTFDNGAIPHQLHLEELEAIIHQQAKYYPFLREDYEKIKSLVTFRIPYFVGPLAKGQSEFAWLTRKADGEIRPWNIEEKVDFGKSAVDFIEKMTNKDTYLPKENVLPKHSLCYQKYMVYNELTKVRYIDDQGKTNYFSGQEKQQIFNDLFKQKRKVKKKDLELFLRNINHIESPTIEGLEDSFNASYATYHDLLKVGMKQEILDNPLNTEMLEDIVKILTVFEDKPMIKEQLQQFSDVLDGGVLKKLERRHYTGWGRLSAKLLVGIREKQSHLTILDYLMNDDGLNRNLMQLINDSNLSFKSIIEKEQVSTTDKDLQSIVADLAGSPAIKKGILQSLKIVDELVSIMGYPPQTIVVEMARENQTTGKGKNNSKPRYKSLEKAIKEFGSKILKEHPTDNQELKNNRLYLYYLQNGKDMYTGQELDIHNLSNYDIDHIVPQSFITDNSIDNLVLTSSAGNREKGGDVPPLEIVRKRKVFWEKLYQGNLMSKRKFDYLTKAERGGLTDADKARFIHRQLVETRQITKNVANILHQRFNNETDNHGNTMEQVRIVTLKSALVSQFRKQFQLYKVREVNDYHHAHDAYLNGVVANTLLKVYPQLEPEFVYGEYHQFDWFKANKATAKKQFYTNIMLFFGQKERIIDENGEILWDKKYLETIKKVLDYRQMNIVKKTEIQKGEFSKATIKPKGNSSKLIPRKENWDPMKYGGLDSPNMAYAVIIEHAKGKKKLIFEKKIIRITIMERKMFEKDEEAFLEEKGYRHPKVLTKLPKYTLYECEKGRRRMLASANEAQKGNQLVLSNHLVSLLYHAKNCEASDGKSLKYIEAHRETFSELLAQVSEFATRYTLADANLSKINNLFEQNKEGDIQAIAQSFVDLMAFNAMGAPASFKFFEATIDRKRYTNLKELLSSTIIYQSITGLYESRKRLDD

SEQ ID NO: 1068 - protein, 874 aa, Listeria seeligeri; identical to SEQ ID NO: 175

SEQ ID NO: 1069 - protein, 1087 aa, Listeriaceae bacterium
MKKLVLGLDIGVASVGWGIIDAENGDVVDTGVRLFSSRDASENESRRTSRQSRRLSRRKKHRRERIKQLLLAHDMDICDIVNENPYELRVKGLNEKLEVSEIYVALTHLAKRRGVSYLDDVVEEGGTIKSEHLNKNMEEIKSGKMPCEIQLERFEKYGQVRGMIEINQDTEESSFLVNIFRTSDYIKEAKTILATQQKFHKQITNEFIDEYIHIMASKRDYFIGPGNEKSRTDYGVYRTNGDTWDNLFEILIGKCSVFPEETRAARSSYVAQEFNLLNDLNNLKISNLESGKLSASQKHDIVEKVKNSKKFGTKDLLKYIASVCECKIEDIGGCRVDKNRKPIMHTFENYRKVHNALNEAGVDLRLSETDYDELMKIMTLNSETLEIKKQCKEKLPQLTEDYLNVCLVLNKKGAFSGWHALSLKAMKLMMPELYGTSKNQMQIIHTMQLGKAYLKPLNQQKYLNSEAILEEIYNPIAARSIRQTIKVTNAILKKYGHLDSVIIEMPRDYQTSEDERKMIEKMQKENEKEKKAALKRAREEYPFPDEAFRNHKELATKLRLWYQQDQFCVYSGRKISVVDLVRNPNQFEIDHIIPQSVSLDDSLNNKVLCFSEENQKKGQQTPFYYHKGKSGNWTYEQYKLFVEKLFDKKKISNKKRELLLFEEDINKWDVRRGFIARNLVDTRYASRVILNSYQQYFGNHEMGTKVKVVRGKFTSQLRKKWRIFKDRNESHSHHAIDALIVAATANLRLWKKNTLGVSDEGKVYDKETGEILPFEKLTESEYNEMMNKEPYLNFKTKLQNIETKVKYSYRVSKKVNRKISDATIYSTRERDGIDYIVGKIKNIYDVKTYKDQFLKRYKKNKEQFLMYQHDPQTFAILENIMATYQDAENPFLAYKKEYGVIRKYSKKGGGSPVTSLKFIDKVLGQKIDLTAKNQAALPKNKKVVLQSITPYRADVYYDEIDKRYHLIGVKYSLFSFSKQGYVINPIAYQKLLEKEQIHSEMKFCFSLYREDIIEFGEDPDSLTRYRFWSKNESGKNKIEVKPIEKPNFEKQTVLTITKKIKILNKYQTDVLGNSFKAQEEKDPRNIE

SEQ ID NO: 1070 - protein, 1345 aa, Marinilabilia sp.
MKKILGLDLGTTSIGWAFIKEPEKDVVGSEIVDMGVRIVALSSDEENDFAKGNTISINADRTLKRGARRNLQRFKLRRDALLEIFKEMKLIPSNFKYAEDGPSSTFSTLKLRDKAAKEKIELDDLVKVLLQINKKRGYRSSRKAKSEEDDGSAIDSMGIAKELYENDLTPGQWVFEALQKGRKNVPDFYRSDLQEEFKKIVNYQSEFYPDVLNSSFVEDWMGKASTPTKQYFNKKGVHLAENKGKREERRLQEYNWRAVAVNSKIDLSEIALILSQINSQISNSSGYLGAISDRSKELYFKNQTVGQYLYQQIKINPHTRLKGQVFYRQDYLDEFEKIWSVQSGFHPQLNDALKKEIRDITIFFQRRLKSQKHLISNCEFEDYHKVVPKSHPIFQEFRIWQNLNNLTLIKKDNLNEKSELALEDKIALANELAFKREQSVKDALNILGLKSSEWEFNFTKIEGNRTNHAFFEAFAKIIEIEDGEPLDLGNLKADDILDQFSEAFLRIGIDPGLLQVNNDIEGPNYEKQPYIQFWHLLYSSEDDQKLKQNLIKKFGFKPDHAKILASISLQDDHASLSSRAIKKILPHLQSGLIYDKACTYAGYNHSSSFTKEENEKRELSSELDLLKKNSLRNPVVEKILNQMINVVNAILKDPNLGKPDEIRVEMARELKANAEQRKNMTSNIASATRDHEKYREILKKEFGLKRVTKNDLLRYKLWLETDGISLYTGKPIEASKLFSKEYDIEHIIPKTRLFDDSFSNKTICERQLNIDKANVTAFSFLQNKLSGDEFEQYQSRVKSLFGKLSKAKIQKLLMANDKIPEDFIARQLQETRYISKKAKEILFEITRRVSVTTGTITDKLREDWGLVEIMKELNWEKYDKLGLTYTIEGKHGERLNKIKDWSKRNDHRHHAMDALTVALTKPAYIQYLNNLNAKELNGKKSTEIFAIEQKYLKRENGKLCFIPPVENIRTEAKKHLSKVLISYKAKNKVVTINKNRTNKKAGFNEQIALTPRGQLHKETVYGKAFHYSTKFEKIGASFDVQKINAVAKKEEREALLKRLAENGDDPKKAFTGKNSLSKMPIYLDLKRNIKLPEKVKTVVLEQNYTIRKNIDPDLKLDKVIDVGVKRILENRLKEFGGNAKLALSNLDENPIWLNKEKGITIKRVKISGVSNVESLHVKKDHFGEPILDQVGNEIPVDFVSTGNNHHVAIYEDEKGNLQEEVVSFFEAVVRQNQGLPIINKNHSLGWKFLFTLKQNEYFVFPSDDFDPTDVDLMDEENYHLISPNLFRVQKFTTKDYFFRHHLETTVEDKSELKGVSFKRLGLPGLNCIKKIRINHLGKIIQVGEY

SEQ ID NO: 1071 - protein, 1091 aa, Mobiluncus mulieris
MDSRKYRVGIDVGTNSVGFAAVEEDDSGSPTRFLNTMVVIHDSGVDSEQKKYAITRLASAGTARRTRRLYRTRRQRLRELDDFISNELGYPLVNLENFADPYEPWKVRADLATTKLPNDELPEAMSIALRHMARHRGWRSPYQRVEALHLHAEISKEFAALKERVVEKTGDVFSDDATPAEVLVDLMGRQKVRGADGVLSGKLRQSDNANELRKIASVQGIDDETLNRIIDRVFSSKSPKGKASERVGMDALPGQGSKPRALKAMPSFQKFRVVSVICNLRIKDSGGDARPLSMEEKEKLIDYLMSSTTDDHVTWTDVADLLHVKRSQLQGTAKEGFDGERPYTRPPVNSTWSKIKDSKIKSLVALWKTGDVDVQSAIVEALSNASVLEDSRPGADIVVAYLESLDDKELESLDKVGLPAGRASYSEDSLERLTERMLRDDCDLFEARKREFNVADDWKPPADPIYAPVGNPGVDRVLKIVNRLLMAAEREWGAPTQINIEHVRSGFSSELMQREFERENERRRAQNEEAVKAILTEKGGNSRVSKYDITRYYAVKRQHCQCLYCGTPITFSDCELDHIVPRKGVGSTNTRVNLAAACRSCNRDKSNLPFAVWAGKASNFDVSIDDAVSRVKQWQRSQNEGVREFRAFQNEVISRLLKTTEDPEIDSRSLESVAWMARELHHRVEYYFQSKGAQTQVSVYRGAVTAQARKSSGLEDKVKMIGGGGKTRLDRRHHAMDAATIALMTPGISTTLSEKNNLRDAQKFTGQSETWKDYCGRTETARKHFAVWKSNMERLTDLFNDKLENDAIPVVQPLRLRLSNSKAHDDGIGKLDSKKLGSVWSLADIDRAATPQIWTALTRCDDFDPTKGLPENANRVIRAQGVKYESEDNIPVFPSNVAAIAVRDGYAEIGSTIHHARIYRIDDGKKTFYSMIRVFAVDLLKHQAEDLFTVKLPPSAISIRTCEDSLRRALSNGTAEYLGWLVPGDEIIVDTSDKAFHTGQIGDLLRNFPVNSFRLTGFPSNSRLRLKPVLLAGEGLRDDAEDSIKKILLGQGWRPAINVLFSKGKPRIVRRNSLGIERPSSNNGLPFSWEA

SEQ ID NO: 1072 - protein, 1233 aa, Mycoplasma canis
MEKKRKVTLGFDLGIASIGWAIVDSETNQVYKLGSRLFDAPDTNLERRTQRGTRRLLRRRKYRNQKFYNLVKRTEVFGLSSREAIENRFRELSIKYPNIIELKTKALSQEVCPDEIAWILHDYLKNRGYFYDEKETKEDFDQQTVESMPSYKLNEFYKKYGYFKGALSQPTESEMKDNKDLKEAFFFDFSNKEWLKEINYFFNVQKNILSETFIEEFKKIFSFTRDISKGPGSDNMPSPYGIFGEFGDNGQGGRYEHIWDKNIGKCSIFTNEQRAPKYLPSALIFNFLNELANIRLYSTDKKNIQPLWKLSSIDKLNILLNLFNLPISEKKKKLTNANINDIVKKESTKSIMLSVEDIDMIKDEWAGKEPNVYGVGLSGLNIEESAKENKFKFQDLKILNVLINLLDNVGIKFEFKDRNDIIKNLELLDNLYLFLIYQKESNNKDSSIDLFIAKNELLNIENLKLKLKEFLLGAGNEFENHNSKTHSLSKKAIDAILPKLLDNNEGWNLEAIKNYDEEIKSQIEDNSSLMAKQDKKYLNDNFLKDAILPPNVKVTFQQAILIFNKIIQKFSKDFEIDKVVIELAREMTQDQENDALKGIAKAQKSKKSLVEERLEANNIDKSVFNDKYEKLIYKIFLWISQDFKDPYTGAQISTNEIVNNKVEIDHIIPYSLCFDDSSANKVLVHKQSNQEKSNSLPYEYIKQGHSGWNWDEFTKYVKRVFVNNVDSILSKKERLKKSENLLTTSYDGYDKLGFLARNLNDTRYATILFRDQLNNYAEHHLIDNKKMFKVIAMNGAVTSFIRKNMSYDNKLRLKDRSDFSHHAYDAAIIALFSNKTKTLYNLIDPSLNGIISKRSEGYWVIEDRYTGEIKELKKEDWTSIKNNVQARKIAKEIEEYLIDLDDEVFFSRKTKRKTNRQLYNETIYGIAAKTDEDGITNYYKKEKFSILDDKDIYLRLLREREKFVINQSNPEVIDQIIEIIESYGKENNIPSRDEAINIKYTKNKINYNLYLKQYMRSLTKSLDQFSEEFINQMIANKTFVLYNPTKNTTRKIKFLRLVNDVKINDIRKNQVINKFNGKNNEPKAFYENINSLGAIVFKNSANNFKTLSINTQIAIFGDKNWDIEDFKTYNMEKIEKYKEIYGIDKTYNFHSFIFPGTILLDKQNKEFYYISSIQTVRDIIEIKFLNKIEFKDENKNPDTSKTPKRLMFGIKSIMNNYEQVDISPFGINKKIFE

SEQ ID NO: 1073 - protein, 1233 aa, Mycoplasma canis
MEKKRKVTLGFDLGIASVGWAIVDSETNQVYKLGSRLFDAPDTNLERRTQRGTRRLLRRRKYRNQKFYNLVKRTEVFGLSSREAIENRFRELSIKYPNIIELKTKALSQEVCPDEIAWILHDYLKNRGYFYDEKETKEDFDQQTIESMPSYKLNEFYKKYGYFKGALSQPTESEMKDNKDLKEAFFFDFSNKEWLKEINYFFNVQKNILSETFIEEFKKIFSFTRDISKGPGSDNMPSPYGIFGEFGDNGQGGRYEHIWDKNIGKCSIFTNEQRAPKYLPSALIFNFLNELANIRLYSTDKKNIQPLWKLSSIDKLNILLNLFNLPISEKKKKLTSANINDIVKKESTKSIMLSVEDIDMIKDEWAGKEPNVYGVGLSGLNIEESAKENKFKFQDLKILNVLINLLDNVGIKFEFKDRNDIIKNLELLDNLYLFLIYQKESNNKDSSIDLFIAKNESLNIENLKLKLKEFLLGAGNEFENHNSKTHSLSKKAIDAILPKLLDNNEGWNLEAIKNYDEEIKSQIEDNSFLMAKQDKKYLNDNFLKDAILPPNVKVTFQQAILIFNKIIQKFSKDFEIDKVVIELAREMTQDQENDALKGIAKAQKSKKSLVEERLEANNIDKSVFNEKYEKLIYKIFLWISQDFKDPYTGAKISANEIVDNKVEIDHIIPYSLCFDDSSANKVLVHKQSNQEKSNSLPYEYIKQGHSGWNWDEFTKYVKRVFVNNVDSILSKKERLKKSENLLTTSYDGYDKLGFLARNLNDTRYATILFRDQLNNYAEHHLIDDKKMFKVIAMNGAVTSFIRKNMSYDNKLRLKNRNDFSHHAYDAAIIALFSNKTKTLYNLIDPSLNGIISKRSEGYWVIEDRYTGEIKELKKEDWTSIKNNVQARKIAKEIEEYLIDLDDEVFFSRKTKRKTNRQLYNETIYGIAAKTDEDGITNYYKKEKLSILDDKDIYLRLLREREKFVINQSNPEVIDQIIEIIESYGKENNIPSRDEAINIKYTKNKINYNLYLKQYMRSLTKSLDQFSEEFINQMIANKTFVLYNPTKNTTRKIKFLRLVNDVKINDIRKNQVINKFNGKNNEPKAFYENINSLGAIVFKNSANNFKTLSINTQIAIFGDKNWDIEDFKTYNMEKIEKYKEIYGIDKTYNFHSFIFPGTILLDKQNKEFYYISSIQTVRDIIEIKFLNKIEFKDENKNQDTSKTPKRLMFGIKSIMNNYEQVDISPFGINKKIFE

SEQ ID NO: 1074 - protein, 1233 aa, Mycoplasma canis; identical to SEQ ID NO: 242

SEQ ID NO: 1075 - protein, 1233 aa, Mycoplasma canis
MEKKRKVTLGFDLGIASVGWAIVDSETNQVYKLGSRLFDAPDTNLERRTQRGTRRLLRRRKYRNQKFYNLVKRTEVFGLSSREAIENRFRELSIKYPNIIELKTKALSQEVCPDEIAWILHDYLKNRGYFYDEKETKEDFDQQTVESMPSYKLNEFYKKYGYFKGALSQPTESEMKDNKDLKEAFFFDFSNKEWLKEINYFFNVQKNILSETFIEEFKKIFSFTRDISKGPGSDNMPSPYGIFGEFGDNGQGGRYEHIWDKNIGKCSIFTNEQRAPKYLPSALIFNFLNELANIRLYSTDKKNIQPLWKLSSVDKLNILLNLFNLPISEKKKKLTSTNINDIVKKESIKSIMISVEDIDMIKDEWAGKEPNVYGVGLSGLNIEENAKENKFKFQDLKILNVLINLLDNVGIKFEFKDRNDIIKNLELLDNLYLFLIYQKESNNKDSSIDLFIAKNKSLNIENLKLKLKEFLLGAGNEFENHNSKSHSLSKKAIDAILPKLLDNNEGWNLEAIKNYDEEIKSQIEDNSSLMAKQDKKYLNDNFLKDAILPPNVKVTFQQAILIFNKIIQKFSKDFEIDKVVIELAREMTQDQENDALKGMAKAQKSKKSLVEERLEANNIDKSVFNDKYEKLIYKIFLWISQDFKDPYTGAQISVNEIVNNKVEIDHIIPYSLCFDDSSANKVLVHKQSNQEKSNSLPYEYIKQGHSGWNWDEFTKYVKRVFVNNVDSILSKKERLKKSENLLTTSYDGYDKLGFLARNLNDTRYATILFRDQLNNYAEHHLIDNKKMFKVIAMNGAVTSFIRKNMSYDNKLRLKDRSDFSHHAYDAAIIALFSNKTKTLYNLIDPSLNGIISKRSEGYWVIEDRYTGEIKELKKEDWTSIKNNVQARKIAKEIEEYLIDLDDEVFFSRKTKRKTNRQLYNETIYGIAAKTDEDGITNYYKKEKFSILDDKDIYLRLLREREKFVINQSNPEVIDQIIEIIESYGKENNIPSRDEAINIKYTKNKINYNLYLKQYMRSLTKSLDKFSEEFINQMIANKTFVLYNPTKNTTRKIKFLRLVNDVKINDIRKNQVINKFNGKNNEPKAFYENINSLGAIVFKNSANNFKTLSINTQIAIFGDKNWDIEDFKTYNMEKIEKYKEIYGIDKTYNFHSFIFPGTILLDKQNKEFYYISSIQTVRDIIEIKFLNKIEFKDENKNQDTSKTPKRLMFGIKSIMNNYEQVDISPFGINKKIFE

SEQ ID NO: 1076 - protein, 1233 aa, Mycoplasma canis
MEKKRKVTLGFDLGIASVGWAIVDSETNQVYKLGSRLFDAPDTNLERRTQRGTRRLLRRRKYRNQKFYNLVKRTEVFGLSSREAIENRFRELSIKYPNIIELKTKALSQEVCPDEIAWILHDYLKNRGYFYDEKETKEDFDQQTVESMPSYKLNEFYKKYGYFKGALSQPTESEMKDNKDLKEAFFFDFSNKEWLKEINYFFNVQKNILSETFIEEFKKIFSFTRDISKGPGSDNMPSPYGIFGEFGDNGQGGRYEHIWDKNIGKCSIFTNEQRAPKYLPSALIFNFLNELANIRLYSTDKKNIQPLWKLSSVDKLNILLNLFNLPISEKKKKLTSTNINDIVKKESIKSIMLSVEDIDMIKYEWAGKEPNVYGVGLSGLNIEESAKENKFKFQDLKILNVLINLLDNVGIKFEFKDRNDIIKNLELLDNLYLFLIYQKESNNKDSSIDLFIAKNKSLNIENLKLKLKEFLLGAGNEFENHNSKTHSLSKKAIDAILPKLLDNNEGWNLEAIKNYDEEIKSQIEDNSSLMAKQDKKYLNDNFLKDAILPPNVKVTFQQAILIFNKIIQKFSKDFEIDKVVIELAREMTQDQENDALKGIAKAQKSKKSLVEERLEANNIDKSVFDDKYEKLIYKIFLWISQDFKDPYTGAKISANEIVNNKVEIDHIIPYSLCFDDSSANKVLVHKQSNQEKSNSLPYEYIKQGHSGWNWDEFTKYVKRVFVNNVDSILSKKERLKKSENLLTTSYDGYDKLGFLARNLNDTRYATILFRDQLNNYAEHHLIDNKKMFKVIAMNGAVTSFIRKNMSYDNKLRLKDRSDFSHHAYDAAIIALFSNKTKTLYNLIDPSLNGIISKRSEGYWVIEDRYTGEIKELKKEDWTSIKNNVQARKIAKEIEEYLIDLDDEVFFSRKTKRKTNRQLYNETIYGIAAKTDEDGITNYYKKEKFSILDDKDIYLRLLREREKFVINQSNPEVIDQIIEIIESYGKENNIPSRDEAINIKYTKNKINYNLYLKQYMRSLTKSLDQFSEEFINQMIANKTFVLYNPTKNTTRKIKFLRLVNDVKINDIRKNQVINKFNGKNNEPKAFYENINSLGAIVFKNSANNFKTLSINTQIAIFGDKNWDIEDFKTYNMEKIEKYKEIYGIDKTYNFHSFIFPGTILLDKQNKEFYYISSIQTVRDIIEIKFLNKIEFKDENKNQDTSKTPKRLMFGIKSIMNNYEQVDISPFGINKKIFE

SEQ ID NO: 1077 - protein, 1239 aa, Mycoplasma cynos
MEEKRKVTLGFDLGVASVGWAIVDSETNEVYKLGSRLFDIPDTNIDRRAKRGSRRLVRRRSYRNQKFYNLIKRTKTFGFLDKEAIEKEFVLLSIKYPNIIELKVKGLQEEVSKSEAVWILHDYLKNRGYFYDDKEEKDDLENPSIESMPSYKLYEFYKEYGYFKGALSSPTESEKNKDSDLEKAIFFNFSNKEWTKEINHFFKIQKNIFSEDFKAKFMEFFSFIRDISKGPGSENMPSQYSIFGKYGDDGMGGKYQHIWDKNIGKCSIFKDKVRAPKYLPSALFFNLLNELSNIRLYSVDKREKSVLWRLSSKDKINIILNILQIILFKNDGKISNLDINKIVKNESIKSIILNEIDLDLIKDMWFEKEPNVYGIGLSGLNIEENKKENRFKFQDLKIFSVFIDLLKKSNINIEFNNEKDIIHNLKLLDELYFFLITQKYSRDKYGSIKKFILNNKSFNIDNLDEKLNIFLSISDDEFDNHNSKTHSLSKEAIYFIFPKLLHNNEGWNLEAIKNYDIDVREEISKHSFGIKKQDKKYLDDAFLDDAILPPSVKVTIKQSILIFNKIIKKFSNKFQIDNVVIELAREMTQEKEMDAQKSLNRLKKSRKKIIEERLNANNIDSKMFRDKTGEISPNYIYKIYLWISQNFKDPYTGENISANDILKNNVEIDHIIPYSLCFDDSSSNKVLVFKHSNQSKGNFLPFDMISTFSENSVWNWKEYTQYVEKTFKTNLESILDKKERVKKADNLLTSSYDGYDKLGFLARNLNDTRYATILFRDQLINYSENHLIDSKKMFKVIAMNGGVTSFIRKNMSFDSGLKVKDRSIFSHHAYDAAIIALFSNKTKILYNLINPSLDGIISKRSEGYWVLEDRLTGEIRKLNYNDWQSIKNNVEVKKIAREIESHLSNLDNVVMFSRKSKRKTNKELYNETLYGIATRIDENGIKNYYKKEKFNILEDENIYLRLLNERENFIINRSNPEVIDAIIEIFETIDKNKIPARDVAKNIKYTDNKIKYNLYLKDYMRKLVDEFPDKFRKDFIEQMIAKKIFILFNPIKNTTRKIKSLRSINNNKIEDIRKKQVLEKFNTAKNEPRSFYESLNSLGAIIFKNNLNIYKKMSISSQIATFGDKNWKIDDINTYNKEKLNKYKEIYGIDETYDFYSFIFPGTILLDEKNKEFLYISSIQTLKDKIELKFLDRIEFEKKNVNSNLKPKIKREIISTKKLMSDYKIIKISPLGINKKIFE

SEQ ID NO: 1078 - protein, 1269 aa, Mycoplasma gallisepticum
MNNSIKSKPEVTIGLDLGVGSVGWAIVDNETNIIHHLGSRLFSQAKTAEDRRSFRGARRLIRRRKYKLKRFINLIWKYNSYFGFKNKEDILNNYQEQQKLHNTVLNLKLEALNAKIDPKALSWILHDYLKNRGHFYEDNRDFNVYPTEELANYFGEYGYYKGIIDSKEDNDDKLEEGLTKYKFSNQHWLEEIKKVLSNQTGLPEKFKEEYESLFSYVRNYSEGPGSINSVSPYGIYHLDEKEGKVVQKYNNIWDKTIGKCSIFPDEYRAPKNSPIAMIFNEINELSTIRSYSIYLTGWFINQEFKKAYLNKLLDLLIKTNSEKPIDARQFKKLREETIAESIGKETLKDVEREEKLEKEDHKWKLKGLKLNTNGKIQYNDLSSLAKFVHKLKQHLKLDFLLEDQYTTLDKINFLQSLFVYLGKHLRYSNRVDSANLKEFSDSNKLFERVLQEQKDDLFKLFEQTDKDDEKILAQTHSLSTKAMLLAITRMTNLDNDEDNQKNNDKGWNFEAIKNFDQKFIDITKKNNNLSLKQDKRYLDDRFINDAILSPGVKRILREATKVFNAILKQFSEEYDVTKVVIELARELSEEKELENTKNYEKLIKKNSDKISERLEALDIAEDKIEDILKSPTKSYKVLLWLQQDHIDPYSQKEIAFEDILTKTEKTEIDHIIPYSISFDDSSSNKLLVLAESNQAKSNQTPYEFITSGNAGIKWEDYEAYCRKFKDGDTSLLDSTQRSKKFAKMMKTDTSSKYDIGFLARNLNDTRYATIVFRDALKDYANNHLVEDKPMFKVVCINGGVTSFLRKNFDKSWYAKKDRDKNIHHAVDASIISIFSNETKTLFNQLTQFADYKLFKNTDGSWKKIDPKTGVVTEVTDENWKQIRVRNQVSEIAKVINKCIQDSNIERKARYSRKIENKTNISLFNDTVYSAKKVGYEDQIKRKNLKTLDIHESAEENKNSKVKKQFVYRKLVNVSLLNNDKLADLFAEKEDILMYRANPWVINLAEQIFNEYTENKKIKSQNVFEKYMLDLTKEFPEKFSEAFVKSMLRNKTAIIYNVEKKVVHRIKRLKILSSELKENKLSNVIIRSKNESGTKLSYQDTINSIALMIMRSIDPTAKKQYIRVPLNTLNLHLGDQDFDLHNIDAYLKKPKFVKYLKANEIGDEYKPWRVLTSGTLLIHKKDKKLMYISSFQNLKDVIEIKNLIETEYKENDDSDPKKKKKANRFLMTLSTILNDYILLDAKDNFDILGLSKNRIDEILNSKLGLDKITK

SEQ ID NO: 1079 - protein, 1224 aa, Mycoplasma gallisepticum
MNNSIKSKPEVTIGLDLGVGSVGWAIVDNETNIIHHLGSRLFSQAKTAEDRRSFRGARRLIRRRKYKLKRFINLIWKYNSYFGFKNKEDILNNYQEQQKLHNTVLNLKLEALNAKIDPKALSWILHDYLKNRGHFYEDNRDFNVYPTEELANYFGEYGYYKGIIDSKEDNDDKLEEGLTKYKFSNQHWLEEIKKVLSNQTGLPEKFKEEYESLFSYVRNYSEGPGSINSVSPYGIYHLDEKEGKVVQKYNNIWDKTIGKCSIFPDEYRAPKNSPIAMIFNEINELSTIRSYSIYLTGWFINQEFKKAYLNKLLDLLIKTNSEKPIDARQFKKLREETIAESIGKETLKDVEREEKLEKEDHKWKLKGLKLNTNGKIQYNDLSSLAKFVHKLKQHLKLDFLLEDQYTTLDKINFLQSLFVYLGKHLRYSNRVDSANLKEFSDSNKLFERVLQEQKDDLFKLFEQTDKDDEKILAQTHSLSTKAMLLAITRMTNLDNDEDNQKNNDKGWNFEAIKNFDQKFIDITKKNNNLSLKQDKRYLDDRFINDAILSPGVKRILREATKVFNAILKQFSEEYDVTKVVIELARELSEEKELENTKNYEKLIKKNSDKISERLEALDIAEDKIEDILKSPTKSYKVLLWLQQDHIDPYSQKEIAFEDILTKTEKTEIDHIIPYSISFDDSSSNKLLVLAESNQAKSNQTPYEFITSGNAGIKWEDYEAYCRKFKDGDTSLLDSTQRSKKFAKMMKTDTSSKYDIGFLARNLNDTRYATIVFRDALKDYANNHLVEDKPMFKVVCINGGVTSFLRKNFDKSWYAKKDRDKNIHHAVDASIISIFSNETKTLFNQLTQFADYKLFKNTDGSWKKIDPKTGVVTEVTDENWKQIRVRNQVSEIAKVINKCIQDSNIERKARYSRKIENKTNISLFNDTVYSAKKVGYEDQIKRKNLKTLDIHESAEENKNSKVKKQFVYRKLVNVSLLNNDKLADLFAEKEDILMYRANPWVINLAEQIFNEYTENKKIKSQNVFEKYMLDLTKEFPEKFSEAFVKSMLRNKTAIIYNVEKKVVHRIKRLKILSSELKENKLSNVIIRSKNESGTKLSYQDTINSIALMIMRSIDPTAKKQYIRVPLNTLNLHLGDQDFDLHNIDAYLKKPKFVKYLKANEIGDEYKPWRVLTSGTLLIHKKDKKLMYISSFQNLKDVIEIKNLIETEYKENDDSDPKKRRKQIGS

SEQ ID NO: 1080 - protein, 1269 aa, Mycoplasma gallisepticum; identical to SEQ ID NO: 133

SEQ ID NO: 1081 - protein, 226 aa, Mycoplasma iowae
MSNKKKITIGLDIGVSSVGWSILREDNVLIDYGSRLFPDAANAKDGKLENEARRSHRSMRRRIRRIKTRKNDLIKLLIKYNIISDQDELAKILEQGIVNETGNVPIVEIKYKGLKEKLSKEELLICLYHYIHKRGYFYITEEDLKENGENINRLPTEIQYDFYMKNGYYIGNEDNQKFSNLIWVKEIEKFLSKQSLDSNFVDEYISLFRRVRDYSDGPGSEKSPTP

SEQ ID NO: 1082 - protein, 1304 aa, Mycoplasma synoviae
MLNNVQNLWKYLLLLIFDKKIIFLFKIKVILIRRYMENNNKEKIVIGFDLGVASVGWSIVNAETKEVIDLGVRLFSEPEKADYRRAKRTTRRLLRRKKFKREKFHKLILKNAEIFGLQSRNEILNVYKDQSSKYRNILKLKINALKEEIKPSELVWILRDYLQNRGYFYKNEKLTDEFVSNSFPSKKLHEHYEKYGFFRGSVKLDNKLDNKKDKAKEKDEEEESDAKKESEELIFSNKQWINEIVKVFENQSYLTESFKEEYLKLFNYVRPFNKGPGSKNSRTAYGVFSTDIDPETNKFKDYSNIWDKTIGKCSLFEEEIRAPKNLPSALIFNLQNEICTIKNEFTEFKNWWLNAEQKSEILKFVFTELFNWKDKKYSDKKFNKNLQDKIKKYLLNFALENFNLNEEILKNRDLENDTVLGLKGVKYYEKSNATADAALEFSSLKPLYVFIKFLKEKKLDLNYLLGLENTEILYFLDSIYLAISYSSDLKERNEWFKKLLKELYPKIKNNNLEIIENVEDIFEITDQEKFESFSKTHSLSREAFNHIIPLLLSNNEGKNYESLKHSNEELKKRTEKAELKAQQNQKYLKDNFLKEALVPLSVKTSVLQAIKIFNQIIKNFGKKYEISQVVIEMARELTKPNLEKLLNNATNSNIKILKEKLDQTEKFDDFTKKKFIDKIENSVVFRNKLFLWFEQDRKDPYTQLDIKINEIEDETEIDHVIPYSKSADDSWFNKLLVKKSTNQLKKNKTVWEYYQNESDPEAKWNKFVAWAKRIYLVQKSDKESKDNSEKNSIFKNKKPNLKFKNITKKLFDPYKDLGFLARNLNDTRYATKVFRDQLNNYSKHHSKDDENKLFKVVCMNGSITSFLRKSMWRKNEEQVYRFNFWKKDRDQFFHHAVDASIIAIFSLLTKTLYNKLRVYESYDVQRREDGVYLINKETGEVKKADKDYWKDQHNFLKIRENAIEIKNVLNNVDFQNQVRYSRKANTKLNTQLFNETLYGVKEFENNFYKLEKVNLFSRKDLRKFILEDLNEESEKNKKNENGSRKRILTEKYIVDEILQILENEEFKDSKSDINALNKYMDSLPSKFSEFFSQDFINKCKKENSLILTFDAIKHNDPKKVIKIKNLKFFREDATLKNKQAVHKDSKNQIKSFYESYKCVGFIWLKNKNDLEESIFVPINSRVIHFGDKDKDIFDFDSYNKEKLLNEINLKRPENKKFNSINEIEFVKFVKPGALLLNFENQQIYYISTLESSSLRAKIKLLNKMDKGKAVSMKKITNPDEYKIIEHVNPLGINLNWTKKLENNN

SEQ ID NO: 1083 - protein, 1401 aa, Myroides injenensis
MKRILGLDLGTTSIGWAYVHEAENVNETSSIQKVGVRVNPLTTEEQTNFEKGKPITTNASRTLARSARRNLQRYKLRRDNLIQILKENNWINNTTSLTETGNHSTFETYELRNKAASEKLTLDQLSRVLLMLNKKRGYKSSRKVNSKEEGQLIDGMEVAKKLYHEQLTPGQLSLQLMNQGVKKLPDYYRSDLNQELESIWNFQQQFYPNILTDKFKEEINGKGLTSTSSAFWNIYNFNTAENKGSRDEKKKQALQWRSEALSKQLSKEIVAYIIADLNGQIYNSSGYLGAISDRSKELYFNNLTVGQYLFKQLKSNPHTSLKNQVFYRQDYLNEFEKIWETQSKFYPKELTAALKREIRDVIIFYQRKLKSQKGLISFCEFEQKQKTINGKTKTIGHRVIPKSSPLFQEFKIWQQLHNVVLRNKKTNEIVSLADEQKVHLFEELNLKGKLKSNQVLKLIENKPKDWELNYTELEGNNTNKALYNAYLDILDIEGYDVRNELKVKLNKDDIELSDLDVNASEIKEMIFSVFKHLGINTEILEFDATLEDKVFEKQASYQLWHLLYSYEEDNSPTGLDRLYNLLHKKFGFKLNHAKLIGNVLFQDDYGSLSSKAIKNIFPYITENNYYTACELAGYKHSKHSLTKEENETRELKNRLTILPKNSLRNPVVEKIINQMINVVNTLIDEENNILIAQGKEPNFQFDEIRIELARELKKNAKEREELTKSINKSKTDHEKIIKILQKEDGIKNPTRNDIVRFKLYSELKNNGYKDLYTNEYIERKDIFTKEYDIEHIIPQSKLFDDSFSNKTLVRRNVNLKKGNQTAYDFILCEYGQEKANEFETRITNLYNLGKDEGISKSKFKKLLMQESEIGNGFIERDLRETQYIAKKAKSLLLEITRNVISTSGSITDRLREDWGLINVMKELNLQKYRDAGLTEFVKMKDGNKKEVIIDWTKRNDHRHHAMDALTIAFTKHNHIQYLNHLNARKNVNNELHNNIIAIEKLETTLVSDERGNKKRIFKEPIANFRTIAKSHLEAILVSHKAKNKVVTKNINKISGKKISQQTLTPRGQLHKETIYGKIRQYVSKQEKVGPKFTIEVIEQVSNPTYRNLLLKRLEENNNDPKKAFGGKNSLNKNPIYINLEKNIKVPEVLKLVWLEDNYTIRKEISPDLKIDKVIDQGVKQILQNRLAQYKGDSKLAFSNLDANPIWLNEDKGIAIKRVTISGIATAQPLHRKKDHLGQPILDHNGQEIPVDFISTGNNHHVAIYEDENGKLQESVVSHFEAVERVNQKLPIIDKTFNQHLGWKFLFTMKQNELFLFPSDDFNPNEIDLFDKQNYTVISKHLFRIQKLSTKDYSFRHHLETNVEEIKDLKTITWRREGLNGIQNIIKVRTNHLGEIIHIGEY

SEQ ID NO: 1084 - protein, 1466 aa, Myroides odoratus
MKNILGLDLGTNSIGWALVKEDFENKQGEILGLGSRIIPMSQDILGEFGRGNSISQTADRTGYRGVRRLRERHLLRRERLHRVLNILGFLPNHYAKEIDFTKRLGKFINHAEPKLSFDKEFIFKDSFNEMLKDFQQNQPGFIINKHGEEALVPYDWTIYYLRKKALTQKIDKEELAWILLNFNQKRGYYQLRGEEEEENTNKLVEFYSLKIIDVIADNEVNKKGEVWYSLHLENGWIYRRSSKISLVDWKDKVRDFIVTTDVNDDGSEKLDKDGVVKRSFRAPSADDWTLLKKKTEQDIDNSNKTVGAYIYENLLLNPKQKIKGKLVRTIERKFYKDELKQILEKQKEFHQELQNEQLLQDCVRELYKYNEQHQQMLESKDFVHLFLNDIIFYQRPLRSQKSLISNCTLEKRVSRDGVVFPIKVISKSNPYYQEFRLLQWLQNLAIYRKDDDVNVTQEFLNSIESWENLLQFLNAKKEIKQEQLIKFLLEQKGLKGNSLKTAILTYRWNYVTDKVYPMNETRSLIQDKLKKVENVATDFLSFDNEMALWHIIYSVNDKIEYEKALAKFASKHNLDEISFVESFKKFPPFKSDYGSFSEKAIKKLLPLMRFGSVWNKNNIVPSVLDRIDKILTGEYDEKIKIRVREKAEQFQLNQIEDFQNLPLWLAQYVVYDRHSEAEIAGKWNSVKDLENYLKEFKQHSLRNPIVEQIITETLRVVKDIWQQYGNGVQNFFDEIHIELGREMKNTADERKRITNSVTENENTNLRIKALLVELKEDTNIENVRPHSPMQQEILKIYEEGVLNAVENIDEDILKISKTAQPSKSELIRYKLWLEQKYQSPYTGEMIPLSRLFTSDYEIEHVIPQSRYFDDSLSNKVICEAAVNKRKDNQLGLEFIKNHHSEKIELGNGRTAQVLEVEAYESFVKKNYDKNRGKRNKLLLEDVPEKMIERQLNDTRYISKFVTHLLSNIVRKDEVNSKDDGINSKNIIPGNGKITSQLKQDWGLNDVWNELILPRFERMNNLTNSTDFTSTNTNGKIIPTVPLEYSKGFSKKRIDHRHHALDALVIALATRDHVNLLNNESALPKKDRTKEEQKSFRFDLQVNLRNKEKYFNVKEGREKEKFTTFKKPWNTLTQDTRDALENMVVSFKQNLRVINKATNYYESYTDENGNLRLDKYGNPKKELISQKGTNWAIRKSLHKETVSGQIHLDRVKVTKGKIVTATRKSLDSSFNEKSIESITDTGIQKILRNYLKAKDNKPDVAFSPEGIEELNKSISVYNEGKNHQPIIKVRIFEQGSKFPVGETGNKIAKFVEAAKGTNLFFGIYQDKTGKRSYDTIPLNLVIERLKQGLSPVPETNEKGHQLLFHLSPNDLVYVPTIDDNEQLDSNRVYKFTDSSDTTCNFIPSNISAIIFNINSKEQEKRGINYPIQNELGVGSPQSKNQKSFDGFMIKEVCIKLKVDRLGNISKT

SEQ ID NO: 1085 - protein, 241 aa, Neisseria lactamica
MAAFKPNPMNYILGLDIGIASVGWAMVEIDKEENPIRLIDLGVRVFERAEMPKTGDSLAMARRLARSVRRLTRRRAHRLLRARRLLKREGVLQDADFDENGLVKSLPNTPWQLRAAALDRKLTCLEWSAVLLHLIKHRGYLSQRKNEGETADKELGALLKGVADNAHALQTGDFRTPAELALNKFEKESGHIRNQRGDYSHTFSRKDLQAELNLLFEKQKEFGNPHVSDGLKEGIETLLMA

SEQ ID NO: 1086 - protein, 666 aa, Neisseria lactamica
MAAFKPNPMNYILGLDIGIASVGWAMVEVDEEENPIRLIDLGVRVFERAEVPKTGDSLAMARRLARSVRRLTRRRAHRLLRARRLLKREGVLQDADFDENGLVKSLPNTPWQLRAAALDRKLTCLEWSAVLLHLVKHRGYLSQRKNEGETADKELGALLKGVADNAHALQTGDFRTPAELALNKFEKESGHIRNQRGDYSHTFSRKDLQAELNLLFEKQKEFGNPHVSDGLKEDIETLLMAQRPALSGDAVQKMLGHCTFEPAEPKAAKNTYTAERFIWLTKLNNLRILEQGSERPLTDTERATLMDEPYRKSKLTYAQARKLLGLEDTAFFKGLRYGKDNAEASTLMEMKAYHAISRALEKEGLKDKKSPLNLSTELQDEIGTAFSLFKTDKDITGRLKDRVQPEILEALLKHISFDKFVQISLKALRRIVPLMEQGKRYDEACAEIYGDHYCKKNAEEKIYLPPIPADEIRNPVVLRALSQARKVINCVVRRYGSPARIHIETAREVGKSFKDRKEIEKRQEENRKDREKAAAKFREYFPNFVGEPKSKDILKLRLYEQQHGKCLYSGKEINLVRLNEKGYVEIDHALPFSRTWDDSFNNKVLVLGSENQNKGNQTPYEYFNGKDNSREWQEFKARVETSRFPRSKNNGFCCKNSMKKDLKNAT

SEQ ID NO: 1087 - protein, 828 aa, Neisseria lactamica
MLGHCTFEPAEPKAAKNTYTAERFIWLTKLNNLRILEQGSERPLTDTERATLMDEPYRKSKLTYAQARKLLGLEDTAFFKGLRYGKDNAEASTLMEMKAYHAISRALEKEGLKDKKSPLNLSTELQDEIGTAFSLFKTDKDITGRLKDRVQPEILEALLKHISFDKFVQISLKALRRIVPLMEQGKRYDEACAEIYGDHYGKKNTEEKIYLPPIPADEIRNPVVLRALSQARKVINAVVRRYDSPARIHIETAREVGKSFKDRKEIEKRQEENRKDREKAAAKFREYFPNFVGEPKSKDILKLRLYEQQHGKCLYSGKEINLVRLNEKGYVEIDHALPFSRTWDDSFNNKVLVLGSENQNKGNQTPYEYFNGKDNSREWQEFKARVETSRFPRSKKQRILLQKFDEEGFKERNLNDTRYVNRFLCQFVADHILLTGKGKRRVFASNGQITNLLRGFWGLRKVRAENDRHHALDAVVVACSTVAMQQKITRFVRYKEMNAFDGKTIDKETGEVLHQKAHFPQPWEFFAQEVMIRVFGKPDGKPEFEEADTSEKLRTLLAEKLSSRPEAVHEYVTPLFVSRAPNRKMSGQGHMETVKSAKRLDEGISVLRVPLTQLKLKDLEKMVNREREPKLYDALKAQLETHKDDPAKAFAEPFYKYDKAGSRTQQVKAVRIEQVQKTGVWVRNHNGIADNATMVRVDVFEKGGKYYLVPIYSWQVAKGILPDRAVVAFKDEEDWTVMDDSFEFRFVLYANDLIKAELKKETFFGYFSGLDRSTGNISLRSHDLDKTKGKDGVYRIGIKTALSFQKHQIDELGKEIRPCRLKKRPPVR

SEQ ID NO: 1088 - protein, 408 aa, Neisseria lactamica
MNDTRYVNRFLCQFVADHILLTGKGKRRVFASNGQITNLLRGFWGLRKVRTENDRHHALDAVVVACSTVAMQQKITRFVRYKEMNAFDGKTIDKETGEVLHQKAHFPQPWEFFAQEVMIRVFGKPDGKPEFEEADTPEKLRTLLAEKLSSRPEAVHEYVTPLFVSRAPNRKMSGQGHMETVKSAKRLDEGISVLRVPLTQLKLKGLEKMVNREREPKLYDALKAQLETHKDDPAKAFAEPFYKYDKAGSRTQQVKAVRIEQVQKTGVWVRNHNGIADNATMVRVDVFEKGGKYYLVPIYSWQVAKGILPDRAVVAFKDEEDWTVMDDSFEFRFVLYANDLIKLTAKKNEFLGYFVSLNRATGAIDIRTHDTDSTKGKNGIFQSVGVKTALSFQKTKSTNSAKKSDHAV

SEQ ID NO: 1089 - protein, 1082 aa, Neisseria meningitidis
MAAFKPNPINYILGLDIGIASVGWAMVEIDEDENPICLIDLGVRVFERAEVPKTGDSLAAARRLARSVRRLTRRRAHRLLRARRLLKREGVLQAADFDENGLIKSLPNTPWQLRAAALDRKLTPLEWSAVLLHLIKHRGYLSQRKNEGETADKELGALLKGVADNAHALQTGDFRTPAELALNKFEKESGHIRNQRGDYSHTFSRKDLQAELILLFEKQKEFGNPHVSGGLKEGIETLLMTQRPALSGDAVQKMLGHCTFEPAEPKAAKNTYTAERFIWLTKLNNLRILEQGSERPLTDTERATLMDEPYRKSKLTYAQARKLLGLEDTAFFKGLRYGKDNAEASTLMEMKAYHAISRALEKEGLKDKKSPLNLSPELQDEIGTAFSLFKTDEDITGRLKDRVQPEILEALLKHISFDKFVQISLKALRRIVPLMEQGKRYDEACAEIYGDHYGKKNTEEKIYLPPIPADEIRNPVVLRALSQARKVINGVVRRYGSPARIHIETAREVGKSFKDRKEIEKRQEENRKDREKAAAKFREYFPNFVGEPKSKDILKLRLYEQQHGKCLYSGKEINLGRLNEKGYVEIDHALPFSRTWDDSFNNKVLVLGSENQNKGNQTPYEYFNGKDNSREWQEFKARVETSRFPRSKKQRILLQKFDEDGFKERNLNDTRYVNRFLCQFVADRMRLTGKGKKRVFASNGQITNLLRGFWGLRKVRAENDRHHALDAVVVACSTVAMQQKITRFVRYKEMNAFDGKTIDKETGEVLHQKTHFPQPWEFFAQEVMIRVFGKPDGKPEFEEADTPEKLRTLLAEKLSSRPEAVHEYVTPLFVSRAPNRKMSGQGHMETVKSAKRLDEGVSVLRVPLTQLKLKDLEKMVNREREPKLYEALKARLEAHKDDPAKAFAEPFYKYDKAGNRTQQVKAVRVEQVQKTGVWVRNHNGIADNATMVRVDVFEKGDKYYLVPIYSWQVAKGILPDRAVVQGKDEEDWQLIDDSFNFKFSLHPNDLVEVITKKARMFGYFASCHRGTGNINIRIHDLDHKIGKNGILEGIGVKTALSFQKYQIDELGKEIRPCRLKKRPPVR

SEQ ID NO: 1090 - protein, 976 aa, Neisseria meningitidis
MAAFKPNPINYILGLDIGIASVGWAMVEIDEDENPICLIDLGVRVFERAEVPKTGDSLAAARRLARSVRRLTRRRAHRLLRARRLLKREGVLQAADFDENGLIKSLPNTPWQLRAAALDRKLTPLEWSAVLLHLIKHRGYLSQRKNEGETADKELGALLKGVADNAHALQTGDFRTPAELALNKFEKESGHIRNQRGDYSHTFSRKDLQAELILLFEKQKEFGNPHVSGGLKEGIETLLMTQRPALSGDAVQKMLGHCTFEPAEPKAAKNTYTAERFIWLTKLNNLRILEQGSERPLTDTERATLMDEPYRKSKLTYAQARKLLGLEDTAFFKGLRYGKDNAEASTLMEMKAYHAISRALEKEGLKDKKSPLNLSPELQDEIGTAFSLFKTDEDITGRLKDRIQPEILEALLKHISFDKFVQISLKALRRIVPLMEQGKRYDEACAEIYGDHYGKKNTEEKIYLPPIPADEIRNPVVLRALSQARKVINGVVRRYGSPARIHIETAREVGKSFKDRKEIEKRQEENRKDREKAAAKFREYFPNFVGEPKSKDILKLRLYEQQHGKCLYSGKEINLGRLNEKGYVEIDHALPFSRTWDDSFNNKVLVLGSENQNKGNQTPYEYFNGKDNSREWQEFKARVETSRFPRSKKQRILLQKFDEDGFKERNLNDTRYVNRFLCQFVADRMRLTGKGKKRVFASNGQITNLLRGFWGLRKVRAENDRHHALDAVVVACSTVAMQQKITRFVRYKEMNAFDGKTIDKETGEVLHQKTHFPQPWEFFAQEVMIRVFGKPDGKPEFEEADTPEKLRTLLAEKLSSRPEAVHEYVTPLFVSRAPNRKMSGQGHMETVKSAKRLDEGVSVLRVPLTQLKLKDLEKMVNREREPKLYEALKARLEAHKDDPAKAFAEPFYKYDKAGNRTQQVKAVRVEQVQKTGVWVRNHNGIADNATMVRVDVFEKGDKYYLVPIYSWQVAKGIFAG

SEQ ID NO: 1091 - protein, 1081 aa, Neisseria meningitidis
MAAFKPNPINYILGLDIGIASVGWAMVEIDEDENPICLIDLGVRVFERAEVPKTGDSLAAARRLARSVRRLTRRRAHRLLRARRLLKREGVLQAADFDENGLIKSLPNTPWQLRSAALDRKLTPLEWSAVLLHLIKHRGYLSQRKNEGETADKELGALLKGVADNAHALQTGDFRTPAELALNKFEKESGHIRNRRGDYSHTFSRKDLQAELDLLFEKQKEFGNPHISDDLKEGIETLLMTQRPALSGDAVQKMLGHCTFEPTEPKAAKNTYTAERFVWLTKLNNLRILEQGSERPLTDTERATLMDEPYRKSKLTYAQARKLLELDDTAFFKGLRYGKDNAEASTLMEMKAYHAISRALEKEGLKDKKSPLNLSPELQDEIGTAFSLFKTDEDITGRLKDRVQPEILEVLLKHISFDKFVQISLKALRRIVPLMEQGKRYDEACAEIYGDHDGKKNTEEKIYLPPIPADEIRNPVVLRALSQARKVINAVVRRYGSPARIHIETAREVGKSFKDRKEIEKRQEENRKDREKAAAKFREYFPNFVGEPKSKDILKLRLYEQQHGKCLYSGKEINLGRLNEKGYVEIDHALPFSRTWDDSFNNKVLVLGSENQNKGNQTPYEYFNGKDNSREWQEFKARVETSRFPRSKKQRILLQKFDEEGFKERNLNDTRYVNRFLCQFVADHMLLTGKGKRRVFASNGQITNLLRGFWGLRKVRAENNRHHALDAVVVACSTVAMQQKITRFVRYKEMNAFDGKTIDKETGEVLHQKTHFPQPWEFFAQEVMIRVFGKPDGKPEFEEADTPEKLRTLLAEKLSSRPEAVHEYVTPLFVSRAPNRKMSGQGHMETVKSAKRLDEGVSVLRVPLTQLKLKDLEKMVNREREPKLYEALKARLEAHKDDPAKAFAEPFYKYDKAGNRTQQVKAVRVEQVQKTGVWVRNHNGIADNATMVRVDVFEKAGKYYLVPIYSWQVAKGILPDRAVVAYADEEGWTVIDESFRFKFVLYSNDLIKVQLKKDSFLGYFSGLDRATGAISLREHDLEKSKGKDGMHRIGVKTALSFQKYQIDEMGKEIRLCRLKKRPPVR

SEQ ID NO: 1092 - protein, 1081 aa, Neisseria meningitidis
MAAFKPNPINYILGLDIGIASVGWAMVEIDEDENPICLIDLGVRVFERAEVPKTGDSLAAARRLARSVRRLTRRRAHRLLRARRLLKREGVLQAADFDENGLIKSLPNTPWQLRSAALDRKLTPLEWSAVLLHLIKHRGYLSQRKNEGETADKELGALLKGVANNAHALQTGDFRTPAELALNKFEKESGHIRNQRGDYSHTFSRKDLQAELILLFEKQKEFGNPHVSGGLKEGIETLLMTQRPALSGDAVQKMLGHCTFEPAEPKAAKNTYTAERFIWLTKLNNLRILEQGSERPLTDTERATLMDEPYRKSKLTYAQARKLLGLEDTAFFKGLRYGKDNAEASTLMEMKAYHAISRALEKEGLKDKKSPLNLSPELQDEIGTAFSLFKTDEDITGRLKDRIQPEILEALLKHISFDKFVQISLKALRRIVPLMEQGKRYDEACAEIYGDHYGKKNTEEKIYLPPIPADEIRNPVVLRALSQARKVINGVVRRYGSPARIHIETAREVGKSFKDRKEIEKRQEENRKDREKAAAKFREYFPNFVGEPKSKDILKLRLYEQQHGKCLYSGKEINLGRLNEKGYVEIDHALPFSRTWDDSFNNKVLVLGSENQNKGNQTPYEYFNGKDNSREWQEFKARVETSRFPRSKKQRILLQKFDEDGFKERNLNDTRYVNRFLCQFVADRMRLTGKGKKRVFASNGQITNLLRGFWGLRKVRAENDRHHALDAVVVACSTVAMQQKITRFVRYKEMNAFDGKTIDKETGEVLHQKTHFPQPWEFFAQEVMIRVFGKPDGKPEFEEADTPEKLRTLLAEKLSSRPEAVHEYVTPLFVSRAPNRKMSGQGHMETVKSAKRLDEGVSVLRVPLTQLKLKDLEKMVNREREPKLYEALKARLEAHKDDPAKAFAEPFYKYDKAGNRTQQVKAVRVEQVQKTGVWVRNHNGIADNATMVRVDVFEKAGKYYLVPIYSWQVAKGILPDRAVVAYADEEGWTVIDESFRFKFVLYSNDLIKVQLKKDSFLGYFSGLDRATGAISLREHDLEKSKGKDGMHRIGVKTALSFQKYQIDEMGKEIRLCRLKKRPPVR

SEQ ID NO: 1093 - protein, 1082 aa, Neisseria meningitidis
MAAFKPNPINYILGLDIGIASVGWAMVEIDEDENPICLIDLGVRVFERAEVPKTGDSLAMARRLARSVRRLTRRRAHRLLRARRLLKREGVLQAADFDENGLIKSLPNTPWQLRAAALDRKLTPLEWSAVLLHLIKHRGYLSQRKNEGETADKELGALLKGVADNAHALQTGDFRTPAELALNKFEKESGHIRNQRGDYSHTFSRKDLQAELILLFEKQKEFGNPHVSGGLKEGIETLLMTQRPALSGDAVQKMLGHCTFEPAEPKAAKNTYTAERFIWLTKLNNLRILEQGSERPLTDTERATLMDEPYRKSKLTYAQARKLLGLEDTAFFKGLRYGKDNAEASTLMEMKAYHAISRALEKEGLKDKKSPLNLSPELQDEIGTAFSLFKTDEDITGRLKDRIQPEILEALLKHISFDKFVQISLKALRRIVPLMEQGKRYDEACAEIYGDHYGKKNTEEKIYLPPIPADEIRNPVVLRALSQARKVINGVVRRYGSPARIHIETAREVGKSFKDRKEIEKRQEENRKDREKAAAKFREYFPNFVGEPKSKDILKLRLYEQQHGKCLYSGKEINLGRLNEKGYVEIDHALPFSRTWDDSFNNKVLVLGSENQNKGNQTPYEYFNGKDNSREWQEFKARVETSRFPRSKKQRILLQKFDEDGFKERNLNDTRYVNRFLCQFVADRMRLTGKGKKRVFASNGQITNLLRGFWGLRKVRAENDRHHALDAVVVACSTVAMQQKITRFVRYKEMNAFDGKTIDKETGEVLHQKTHFPQPWEFFAQEVMIRVFGKPDGKPEFEEADTPEKLRTLLAEKLSSRPEAVHEYVTPLFVSRAPNRKMSGQGHMETVKSAKRLDEGVSVLRVPLTQLKLKDLEKMVNREREPKLYEALKARLEAHKDDPAKAFAEPFYKYDKAGNRTQQVKAVRVEQVQKTGVWVRNHNGIADNATMVRVDVFEKGDKYYLVPIYSWQVAKGILPDRAVVQGKDEEDWQLIDDSFNFKFSLHPNDLVEVITKKARMFGYFASCHRGTGNINIRIHDLDHKIGKNGILEGIGVKTALSFQKYQIDELGEEIRPCRLKKRPPVR

SEQ ID NO: 1094 - protein, 1082 aa, Neisseria meningitidis
MAAFKPNPINYILGLDIGIASVGWAMVEIDEDENPICLIDLGVRVFERAEVPKTGDSLAMARRLARSVRRLTRRRAHRLLRARRLLKREGVLQAADFDENGLIKSLPNTPWQLRAAALDRKLTPLEWSAVLLHLIKHRGYLSQRKNEGETADKELGALLKGVADNAHALQTGDFRTPAELALNKFEKESGHIRNQRGDYSHTFSRKDLQAELILLFEKQKEFGNPHVSGGLKEGIETLLMTQRPALSSDAVQKMLGHCTFEPAEPKAAKNTYTAERFIWLTKLNNLRILEQGSERPLTDTERATLMDEPYRKSKLTYAQARKLLGLEDTAFFKGLRYGKDNAEASTLMEMKAYHAISRALEKEGLKDKKSPLNLSPELQDEIGTAFSLFKTDEDITGRLKDRIQPEILEALLKHISFDKFVQISLKALRRIVPLMEQGKRYDEACAEIYGDHYGKKNTEEKIYLPPIPADEIRNPVVLRALSQARKVINGVVRRYGSPARIHIETAREVGKSFKDRKEIEKRQEENRKDREKAAAKFREYFPNFVGEPKSKDILKLRLYEQQHGKCLYSGKEINLGRLNEKGYVEIDHALPFSRTWDDSFNNKVLVLGSENQNKGNQTPYEYFNGKDNSREWQEFKARVETSRFPRSKKQRILLQKFDEDGFKERNLNDTRYVNRFLCQFVADRMRLTGKGKKRVFASNGQITNLLRGFWGLRKVRAENDRHHALDAVVVACSTVAMQQKITRFVRYKEMNAFDGKTIDKETGEVLHQKTHFPQPWEFFAQEVMIRVFGKPDGKPEFEEADTPEKLRTLLAEKLSSRPEAVHEYVTPLFVSRAPNRKMSGQGHMETVKSAKRLDEGVSVLRVPLTQLKLKDLEKMVNREREPKLYEALKARLEAHKDDPAKAFAEPFYKYDKAGNRTQQVKAVRVEQVQKTGVWVRNHNGIADNATMVRVDVFEKGDKYYLVPIYSWQVAKGILPDRAVVQGKDEEDWQLIDDSFNFKFSLHPNDLVEVITKKARMFGYFASCHRGTGNINIRIHDLDHKIGKNGILEGIGVKTALSFQKYQIDELGKEIRPCRLKKRPPVR

SEQ ID NO: 1095 - protein, 1082 aa, Neisseria meningitidis
MAAFKPNPINYILGLDIGIASVGWAMVEIDEDENPICLIDLGVRVFERAEVPKTGDSLAMARRLARSVRRLTRRRAHRLLRARRLLKREGVLQAADFDENGLIKSLPNTPWQLRAAALDRKLTPLEWSAVLLHLIKHRGYLSQRKNEGETADKELGALLKGVADNAHALQTGDFRTPAELALNKFEKESGHIRNQRGDYSHTFSRKDLQAELILLFEKQKEFGNPHVSGGLKEGIETLLMTQRPALSSDAVQKMLGHCTFEPAEPKAAKNTYTAERFIWLTKLNNLRILEQGSERPLTDTERATLMDEPYRKSKLTYAQARKLLGLEDTAFFKGLRYGKDNAEASTLMEMKAYHAISRALEKEGLKDKKSPLNLSPELQDEIGTAFSLFKTDEDITGRLKDRIQPEILEALLKHISFDKFVQISLKALRRIVPLMEQGKRYDEACAEIYGDHYGKKNTEEKIYLPPIPADEIRNPVVLRALSQARKVINGVVRRYGSPARIHIETAREVGKSFKDRKEIEKRQEENRKDREKAAAKFREYFPNFVGEPKSKDILKLRLYEQQHGKCLYSGKEINLGRLNEKGYVEIDHALPFSRTWDDSFNNKVLVLGSENQNKGNQTPYEYFNGKDNSREWQEFKARVETSRFPRSKKQRILLQKFDEDGFKERNLNDTRYVNRFLYQFVADRMRLTGKGKKRVFASNGQITNLLRGFWGLRKVRAENDRHHALDAVVVACSTVAMQQKITRFVRYKEMNAFDGKTIDKETGEVLHQKTHFPQPWEFFAQEVMIRVFGKPDGKPEFEEADTPEKLRTLLAEKLSSRPEAVHEYVTPLFVSRAPNRKMSGQGHMETVKSAKRLDEGVSVLRVPLTQLKLKDLEKMVNREREPKLYEALKARLEAHKDDPAKAFAEPFYKYDKAGNRTQQVKAVRVEQVQKTGVWVRNHNGIADNATMVRVDVFEKGDKYYLVPIYSWQVAKGILPDRAVVQGKDEEDWQLIDDSFNFKFSLHPNDLVEVITKKARMFGYFASCHRGTGNINIRIHDLDHKIGKNGILEGIGVKTALSFQKYQIDELGKEIRPCRLKKRPPVR

SEQ ID NO: 1096 - protein, 1081 aa, Neisseria meningitidis
MAAFKPNPINYILGLDIGIASVGWAMVEIDEDENPICLIDLGVRVFERAEVPKTGDSLAMARRLARSVRRLTRRRAHRLLRARRLLKREGVLQAADFDENGLIKSLPNTPWQLRAAALDRKLTPLEWSAVLLHLIKHRGYLSQRKNEGETADKELGALLKGVADNAHALQTGDFRTPAKLALNKFEKESGHIRNQRGDYSHTFSRKDLQAELNLLFEKQKEFGNPHISDGLKEGIETLLMTQRPALSGDAVQKMLGHCTFEPTEPKAAKNTYTAERFVWLTKLNNLRILEQGSEQPLTDTQRAKLMDEPYRKSKLTYAQARKLLGLEDTAFFKGLRYGKDNAEASTLMEMKAYHAISRALEKEGLKDKKSPLNLSPELQDEIGTAFSLFKTDEDITGRLKDRVQPEILEALLKHISFDKFVQISLKALRRIVPLMEQGKRYNEACAEIYGDHYGKKNTEEKIYLPPIPADEIRNPVVLRALSQARKVINGVVRRYGSPARIHIETAREVGKSFKDRKEIEKRQEENRKDREKAAAKFQEYFPNFVGEPKSKDILKLRLYEQQHGKCLYSGKEINLGRLNEKGYVEIDHALPFSRTWDDSFNNKVLVLGSENQNKGNQTPYEYFNGKDNSREWQEFKARVETSRFPRSKKQRILLQKFDEDGFKERNLNDTRYVNRFLCQFVADRMRLTGKGKKRVFASNGQITNLLRGFWGLRKVRAENDRHHALDAVVVACSTVAMQQKITRFVRYKEMNAFDGKTIDKETGEVLHQKTHFPQPWEFFAQEVMIRVFGKPDGKPEFEEADTPEKLRTLLAEKLSSRPEAVHEYVTPLFVSRAPNRKMSGQGHMETVKSAKRLDEGVSVLRVPLTQLKLKDLEKMVNREREPKLYEALKARLEAHKDDPAKAFAEPFYKYDKAGNRTQQVKAVRVEQVQKTGVWVRNHNGIADNATMVRVDVFEKGDKYYLVPIYSWQVAKGILPDRAVVAYADEEDWTVIDESFRFKFVLYSNDLIKVQLKKDSFLGYFSGLDRATGAISLREHDLEKSKGKDGMHRIGVKTALSFQKYQIDEMGKEIRPCRLKKRPPVR

SEQ ID NO: 1097 - protein, 1081 aa, Neisseria meningitidis
MAAFKPNPINYILGLDIGIASVGWAMVEIDEEENPIRLIDLGVRVFERAEVPKTGDSLAMARRLARSVRRLTRRRAHRLLRARRLLKREGVLQAADFDENGLIKSLPNTPWQLRAAALDRKLTPLEWSAVLLHLIKHRGYLSQRKNEGETADKELGALLKGVADNAHALQTGDFRTPAELALNKFEKECGHIRNQRGDYSHTFSRKDLQAELNLLFEKQKEFGNPHVSGGLKEGIETLLMTQRPALSGDAVQKMLGHCTFEPAEPKAAKNTYTAERFIWLTKLNNLRILEQGSERPLTDTERATLMDEPYRKSKLTYAQARKLLSLEDTAFFKGLRYGKDNAEASTLMEMKAYHTISRALEKEGLKDKKSPLNLSPELQDEIGTAFSLFKTDEDITGRLKDRIQPEILEALLKHISFDKFVQISLKALRRIVPLMEQGKRYDEACAEIYGDHYGKKNTEEKIYLPPIPADEIRNPVVLRALSQARKVINGVVRRYGSPARIHIETAREVGKSFKDRKEIEKRQEENRKDREKAAAKFREYFPNFVGEPKSKDILKLRLYEQQHGKCLYSGKEINLGRLNEKGYVEIDHALPFSRTWDDSFNNKVLVLGSENQNKGNQTPYEYFNGKDNSREWQEFKARVETSRFPRSKKQRILLQKFDEDGFKERNLNDTRYVNRFLCQFVADRMRLTGKGKKRVFASNGQITNLLRGFWGLRKVRAENDRHHALDAVVVACSTVAMQQKITRFVRYKEMNAFDGKTIDKETGEVLHQKTHFPQPWEFFAQEVMIRVFGKPDGKPEFEEADTPEKLRTLLAEKLSSRPEAVHEYVTPLFVSRAPNRKMSGQGHMETVKSAKRLDEGVSVLRVPLTQLKLKDLEKMVNREREPKLYEALKARLEAHKDDPAKAFAEPFYKYDKAGNRTQQVKAVRVEQVQKTGVWVRNHNGIADNATMVRVDVFEKGDKYYLVPIYSWQVAKGILPDRAVVAYADEEDWTVIDESFRFKFVLYSNDLIKVQLKKDSFLGYFSGLDRATGAISLREHDLEKSKGKDGMHRIGVKTALSFQKYQIDEMGKEIRPCRLKKRPPVR

SEQ ID NO: 1098 - protein, 1082 aa, Neisseria meningitidis
MAAFKPNPINYILGLDIGIASVGWAMVEIDEEENPIRLIDLGVRVFERAEVPKTGDSLAMARRLARSVRRLTRRRAHRLLRARRLLKREGVLQAADFDENGLIKSLPNTPWQLRAAALDRKLTPLEWSAVLLHLIKHRGYLSQRKNEGETADKELGALLKGVADNAHALQTGDFRTPAELALNKFEKECGHIRNQRGDYSHTFSRKDLQAELNLLFEKQKEFGNPHVSGGLKEGIETLLMTQRPALSGDAVQKMLGHCTFEPAEPKAAKNTYTAERFIWLTKLNNLRILEQGSERPLTDTERATLMDEPYRKSKLTYAQARKLLGLEDTAFFKGLRYGKDNAEASTLMEMKAYHAISRALEKEGLKDKKSPLNLSPELQDEIGTAFSLFKTDEDITGRLKDRIQPEILEALLKHISFDKFVQISLKALRRIVPLMEQGKRYDEACAEIYGDHYGKKNTEEKIYLPPIPADEIRNPVVLRALSQARKVINGVVRRYGSPARIHIETAREVGKSFKDRKEIEKRQEENRKDREKAAAKFREYFPNFVGEPKSKDILKLRLYEQQHGKCLYSGKEINLVRLNEKGYVEIDHALPFSRTWDDSFNNKVLVLGSENQNKGNQTPYEYFNGKDNSREWQEFKARVETSRFPRSKKQRILLQKFDEEGFKERNLNDTRYVNRFLCQFVADHILLTGKGKRRVFASNGQITNLLRGFWGLRKVRAENDRHHALDAVVVACSTVAMQQKITRFVRYKEMNAFDGKTIDKETGEVLHQKTHFPQPWEFFAQEVMIRVFGKPDGKPEFEEADTPEKLRTLLAEKLSSRPEAVHEYVTPLFVSRAPNRKMSGQGHMETVKSAKRLDEGVSVLRVPLTQLKLKDLEKMVNREREPKLYEALKARLEAHKDDPAKAFAEPFYKYDKAGNRTQQVKAVRVEQVQKTGVWVRNHNGIADNATMVRVDVFEKGGKYYLVPIYSWQVAKGILPDRAVVQGKDEEDWQLIDDSFNFKFSLHPNDLVEVITKKARMFGYFASCHRGTGNINIRIHDLDHKIGKNGILEGIGVKTALSFQKYQIDELGKEIRPCRLKKRPPVR

SEQ ID NO: 1099 - protein, 1081 aa, Neisseria meningitidis
MAAFKPNPINYILGLDIGIASVGWAMVEIDEEENPIRLIDLGVRVFERAEVPKTGDSLAMARRLARSVRRLTRRRAHRLLRARRLLKREGVLQAADFDENGLIKSLPNTPWQLRAAALDRKLTPLEWSAVLLHLIKHRGYLSQRKNEGETADKELGALLKGVADNAHALQTGDFRTPAELALNKFEKESGHIRNQRGDYSHTFSRKDLQAELILLFEKQKEFGNPHVSGGLKEGIETLLMTQRPALSGDAVQKMLGHCTFEPAEPKAAKNTYTAERFIWLTKLNNLRILEQGSERPLTDTERATLMDEPYRKSKLTYAQARKLLGLEDTAFFKGLRYGKDNAEASTLMEMKAYHAISRALEKEGLKDKKSPLNLSPELQDEIGTAFSLFKTDEDITGRLKDRVQPEILEALLKHISFDKFVQISLKALRRIVPLMEQGKRYDEACAEIYGDHYGKKNTEEEIYLPPITADEIRNPVVLRALSQARKVINAVVRRYGSPARIHIETAREVGKSFKDRKEIEKRQEENRKDREKAAAKFREYFPNFVGEPKSKDILKLRLYEQQHGKCLYSGKEINLVRLNEKGYVEIDHALPFSRTWDDSFNNKVLVLGSENQNKGNQTPYEYFNGKENSREWQEFKARVETSRFPRSKKQRILLQKFDEDGFKERNLNDTRYVNRFLCQFVADRMRLTGKGKKRVFASNGQITNLLRGFWGLHKVRAENDRHHALDAVVVACSTIAMQQKITRFVRYKEMNAFDGKTIDKETGEVLHQKAHFPQPWEFFAQEVMIRVFGKPDGKPEFEEADTPEKLRTLLAEKLSSRPEAVHEYVTPLFVSRAPNRKMSGQGHMETVKSAKRLDEGISVLRVPLTQLKLKDLEKMVNRAREPKLYEALKARLEAHKDDPAKAFAEPFYKYDKAGNRTQQVKAVRVEQVQKTGVWVRNHNGIADNATMVRVDVFEKAGKYYLVPIYSWQVAKGILPDRAVVAYADEEDWTVIDESFRFKFVLYSNDLIKVQLKKDSFLGYFSGLDRATGAISLREHDLEKSKGKDGMHRIGVKTALSFQKYQIDEMGKEIRPCRLKKRPPVR

SEQ ID NO: 1100 - protein, 1082 aa, Neisseria meningitidis
MAAFKPNPINYILGLDIGIASVGWAMVEIDEEENPIRLIDLGVRVFERAEVPKTGDSLAMARRLARSVRRLTRRRAHRLLRARRLLKREGVLQAADFDENGLIKSLPNTPWQLRAAALDRKLTPLEWSAVLLHLIKHRGYLSQRKNEGETADKELGALLKGVANNAHALQTGDFRTPAELALNKFEKESGHIRNQRGDYSHTFSRKDLQAELILLFEKQKEFGNPHVSGGLKEGIETLLMTQRPALSGDAVQKMLGHCTFEPAEPKAAKNTYTAERFIWLTKLNNLRILEQGSERPLTDTERATLMDEPYRKSKLTYAQARKLLGLEDTAFFKGLRYGKDNAEASTLMEMKAYHAISRALEKEGLKDKKSPLNLSSELQDEIGTAFSLFKTDEDITGRLKDRVQPEILEALLKHISFDKFVQISLKALRRIVPLMEQGKRYDEACAEIYGDHYGKKNTEEKIYLPPIPADKIRNPVVLRALSQARKVINGVVRRYGSPARIHIETAREVGKSFKDRKEIEKRQEENRKDREKAAAKFREYFPNFVGEPKSKDILKLRLYEQQHGKCLYSGKEINLVRLNEKGYVEIDHALPFSRTWDDSFNNKVLVLGSENQNKGNQTPYEYFNGKDNSREWQEFKARVETSRFPRSKKQRILLQKFDEDGFKECNLNDTRYVNRFLCQFVADHILLTGKGKRRVFASNGQITNLLRGFWGLRKVRAENDRHHALDAVVVACSTVAMQQKITRFVRYKEMNAFDGKTIDKETGKVLHQKTHFPQPWEFFAQEVMIRVFGKPDGKPEFEEADTPEKLRTLLAEKLSSRPEAVHEYVTPLFVSRAPNRKMSGAHKDTLRSAKRFVKHNEKISVKRVWLTEIKLADLENMVNYKNGREIELYEALKARLEAYGGNAKQAFDPKDNPFYKKGGQLVKAVRVEKTQESGVLLNKKNAYTIADNGDMVRVDVFCKVDKKGKNQYFIVPIYAWQVAENILPDIDCKGYRIDDSYTFCFSLHKYDLIAFQKDEKSKVEFAYYINCDSSNGRFYLAWHDKGSKEQQFRISTQNLVLIQKYQVNELGKEIRPCRLKKRPPVR

SEQ ID NO: 1101 - protein, 1082 aa, Neisseria meningitidis
MAAFKPNPINYILGLDIGIASVGWAMVEIDEEENPIRLIDLGVRVFERAEVPKTGDSLAMARRLARSVRRLTRRRAHRLLRARRLLKREGVLQAADFDENGLIKSLPNTPWQLRAAALDRKLTPLEWSAVLLHLIKHRGYLSQRKNEGETADKELGALLKGVANNAHALQTGDFRTPAELALNKFEKESGHIRNQRGDYSHTFSRKDLQAELILLFEKQKEFGNPHVSGGLKEGIETLLMTQRPALSGDAVQKMLGHCTFEPAEPKAAKNTYTAERFIWLTKLNNLRILEQGSERPLTDTERATLMDEPYRKSKLTYAQARKLLGLEDTAFFKGLRYGKDNAEASTLMEMKAYHAISRALEKEGLKDKKSPLNLSSELQDEIGTAFSLFKTDEDITGRLKDRVQPEILEALLKHISFDKFVQISLKALRRIVPLMEQGKRYDEACAEIYGDHYGKKNTEEKIYLPPIPADEIRNPVVLRALSQARKVINGVVRRYGSPARIHIETAREVGKSFKDRKEIEKRQEENRKDREKAAAKFREYFPNFVGEPKSKDILKLRLYEQQHGKCLYSGKEINLVRLNEKGYVEIDHALPFSRTWDDSFNNKVLVLGSENQNKGNQTPYEYFNGKDNSREWQEFKARVETSRFPRSKKQRILLQKFDEDGFKECNLNDTRYVNRFLCQFVADHILLTGKGKRRVFASNGQITNLLRGFWGLRKVRAENDRHHALDAVVVACSTVAMQQKITRFVRYKEMNAFDGKTIDKETGKVLHQKTHFPQPWEFFAQEVMIRVFGKPDGKPEFEEADTPEKLRTLLAEKLSSRPEAVHEYVTPLFVSRAPNRKMSGAHKDTLRSAKRFVKHNEKISVKRVWLTEIKLADLENMVNYKNGREIELYEALKARLEAYGGNAKQAFDPKDNPFYKKGGQLVKAVRVEKTQESGVLLNKKNAYTIADNGDMVRVDVFCKVDKKGKNQYFIVPIYAWQVAENILPDIDCKGYRIDDSYTFCFSLHKYDLIAFQKDEKSKVEFAYYINCDSSNGRFYLAWHDKGSKEQQFRISTQNLVLIQKYQVNELGKEIRPCRLKKRPPVR

SEQ ID NO: 1102 - protein, 1082 aa, Neisseria meningitidis
MAAFKPNPINYILGLDIGIASVGWAMVEIDEEENPIRLIDLGVRVFERAEVPKTGDSLAMARRLARSVRRLTRRRAHRLLRTRRLLKREGVLQAANFDENGLIKSLPNTLWQLRAAALDRKLTPLEWSAVLLHLIKHRGYLSQRKNEGETADKELGALLKGVAGNAHALQTGDFRTPAELALNKFEKESGHIRNQRGDYSHTFSRKDLQAELNLLFEKQKEFGNPHISDGLKEGIETLLMTQRPALSGDAVQKMLGHCTFEPTEPKAAKNTYTTERFIWLTKLNNLRILEQGSERPLTDTERATLMDEPYRKSKLTYAQARKLLELDDIAFFKGLRYGKDNAEASTLMEMKAYHAISRALEKEGLKDKKSPLNLSPELQDEIGTAFSLFKTDEDITGRLKDRIQPEILEALLKHINFDKFVQISLKALRRIVPLMEQGKRYDEACAEIYGDHYGKKNTEEKIDLPPIPADEIHNPVVLRALSQARKVINGVVRRYGSPARIHIETAREVGKSFKDRKEIEKRQEENRKDREKAAAKFREYFPNFVGEPKSKDILKLRLYEQQHGKCLYSGKEINLGRLNEKGYVEIDHALPFSRTWDDSFNNKVLVLGSENQNKGNQTPYEYFNGKDNSREWQEFKARVETSRFPRSKKQRILLQKFDEDGFKERNLNDTRYVNRFLCQFVADRMRLTGKGKKRVFASNGQITNLLRGFWGLRKVRAENDRHHALDAVVVACSTVAMQQKITRFVRYKEMNAFDGKTIDKETGEVLHQKTHFPQPWEFFAQEVMIRVFGKPDGKPEFEEADTPEKLRTLLTEKLSSRPEAVHEYVTPLFVSRAPNRKMSGQGHMETVKSAKRLDEGISVLRVPLTQLKLKDLEKMVNREREPKLYEALKARLEAHKDDPAKAFAEPFYKYDKAGNRTQQVKAMRVEQVQKTGVWVRNHNGIADNATMVRVDVFEKGDKYYLVPIYSWQVAKGILPDRAVVQGKDEEDWQLIDDSFNFKFSLHPNDLVEVITKKARMFGYFASCHRGTGNINIRIHDLDHKIGKNGILEGIGVKTALSFQKYQIDELGKEIRPCRLKKRPPVR

SEQ ID NO: 1103 - protein, 1082 aa, Neisseria meningitidis
MAAFKPNPINYILGLDIGIASVGWAMVEIDEEENPIRLIDLSVRVFERAEVPKTGDSLAMARRLARSVRRLTRRRAHRLLRARRLLKREGVLQAADFDENGLIKSLPNTPWQLRAAALDRKLTPLEWSAVLLHLIKHRGYLSQRKNEGETADKELGALLKGVADNAHALQTGDFRTPAELALNKFEKESGHIRNQRGDYSHTFSRKDLQAELILLFEKQKEFGNPHVSGGLKEGIETLLMTQRPALSGDAVQKMLGHCTFEPAEPKAAKNTYTAERFVWLTKLNNLRILEQGSERPLTDTERATLMDEPYRKSKLTYAQARKLLGLEDTAFFKGLRYGKDNAEASTLMEMKAYHAISRALEKEGLKDKKSPLRLSPELQDEIGTAFSLFKTDEDITGRLKDRVQPEILEALLKHISFDKFVQISLKALRRIVPLMEQGKRYDEACAEIYGDHYGKKNAEEKIYLPPIPADEIRNPVVLRALSQARKVINGVVRRYGSPARIHIETAREVGKSFKDRKEIEKRQEENRKDREKAAAKFREYFPNFVGEPKSKDILKLRLYEQQHGKCLYSGKEINLGRLNEKGYVEIDHALPFSRTWDDSFNNKVLVLGSENQNKGNQTPYEYFNGKDNSREWQEFKARVETSRFPRSKKQRILLQKFDEDGFKERNLNDTRYVNRFLCQFVADRMRLTGKGKKRVFASNGQITNLLRGFWGLRKVRAENDRHHALDAVVVACSTVAMQQKITRFVRYKEMNAFDGKTIDKETGEVLHQKTHFPQPWEFFAQEVMIRVFGKPDGKPEFEEADTPEKLRTLLAEKLSSRPEAVHEYVTPLFVSRAPNRKMSGQGHMETVKSAKRLDEGVSVLRVPLTQLKLKDLEKMVNREREPKLYEALKARLEAHKDDPAKAFAEPFYKYDKAGNRTQQVKAVRVEQVQKTGVWVRNHNGIADNATMVRVDVFEKGDKYYLVPIYSWQVAKGILPDRAVVQGKDEEDWQLIDDSFNFKFSLHPNDLVEVITKKARMFGYFASCHRGTGNINIRIHDLDHKIGKNGILEGIGVKTALSFQKYQIDELGKEIRPCRLKKRPPVR

SEQ ID NO: 1104 - protein, 1082 aa, Neisseria meningitidis
MAAFKPNSINYILGLDIGIASVGWAMVEIDEEENPIRLIDLGVRVFERAEVPKTGDSLAMARRLARSVRRLTRRRAHRLLRTRRLLKREGVLQAANFDENGLIKSLPNTPWQLRAAALDRKLTPLEWSAVLLHLIKHRGYLSQRKNEGETADKELGALLKGVAGNAHALQTGDFRTPAELALNKFEKESGHIRNQRSDYSHTFSRKDLQAELILLFEKQKEFGNPHVSGGLKEGIETLLMTQRPALSGDAVQKMLGHCTFEPAEPKAAKNTYTAERFIWLTKLNNLRILEQGSERPLTDTERATLMDEPYRKSKLTYAQARKLLGLEDTAFFKGLRYGKDNAEASTLMEMKAYHAISRALEKEGLKDKKSPLNLSPELQDEIGTAFSLFKTDEDITGRLKDRIQPEILEALLKHISFDKFVQISLKALRRIVPLMEQGKRYDEACAEIYGDHYGKKNTEEKIYLPPIPADEIRNPVVLRALSQARKVINGVVRRYGSPARIHIETAREVGKSFKDRKEIEKRQEENRKDREKAAAKFREYFPNFVGEPKSKDILKLRLYEQQHGKCLYSGKEINLGRLNEKGYVEIDHALPFSRTWDDSFNNKVLVLGSENQNKGNQTPYEYFNGKDNSREWQEFKARVETSRFPRSKKQRILLQKFDEDGFKERNLNDTRYVNRFLCQFVADRMRLTGKGKKRVFASNGQITNLLRGFWGLRKVRAENDRHHALDAVVVACSTVAMQQKITRFVRYKEMNAFDGKTIDKETGEVLHQKTHFPQPWEFFAQEVMIRVFGKPDGKPEFEEADTLEKLRTLLAEKLSSRPEAVHEYVTPLFVSRAPNRKMSGQGHMETVKSAKRLDEGVSVLRVPLTQLKLKDLEKMVNREREPKLYEALKARLEAHKDDPAKAFAEPFYKYDKAGNRTQQVKAVRVEQVQKTGVWVRNHNGIADNATMVRVDVFEKGDKYYLVPIYSWQVAKGILPDRAVVQGKDEEDWQLIDDSFNFKFSLHPNDLVEVITKKARMFGYFASCHRGTGNINIRIHDLDHKIGKNGILEGIGVKTALSFQKYQIDELGKEIRPCRLKKRPPVR

SEQ ID NO: 1105 - protein, 67 aa, Neisseria meningitidis
MFGYFASCHRGTGNINIRIHDLDHKIGKNGILEGIGVKTALSFQKYQIDELGKEIRPCRLKKRPPVR

SEQ ID NO: 1106 - protein, 220 aa, Neisseria mucosa
MRHIFSDGLKEGIETLLMTQRPALSGDAVQKMLGHCTFEPTEPKAAKNTYTAERFIWLTKLNNLRILEQGSERPLTNTERATLMDEPYRKSKLTYAQARKLLGLKDTAFFKGLRYGKDNAEASTLMEMKAYHAISRALEKEGLKDKKSPLNLSPELQDEIGTAFSLFKTDEDITGRLKTELTPASNKTLSRPFTVKSASNGSTSAPWLPSTKWFLHFKPA

SEQ ID NO: 1107 - protein, 392 aa, Neisseria sp.
MAPFTLKPLNYILGLDIGIASVGWAVVETDSDVLPYRLIDVGVRTFDRAEVPKTGESPAAARRLARSVRRMIRRRAHRMLRARRLLKREGMLQAADFDAHGLVENLPVNPWQLRVDALSRKLMPLEWAAVLLHMVKHRGYLSQRKNERNSSDKELGALLSGVAANSEALQGGDFRTPAELAVNKFEKESGHIRNQRGDYSHTFNRKDVQAELVLLFEKQKEYGNPYISDGLLTGVEDLLMTQRAALSGDAVQKMLGRCTFEPEEYKAAKNTYSAERFVWLTKLNNLRILDQGSERPLTDSERAKLMDEPYKKTKLTYAQVRRLLELDDTAFFKGLRYSKDNAESATLMEMKAYHSISGALEKAGLKNKKIAAGLIARIAGRNRRGVFAIQNR

SEQ ID NO: 1108 - protein, 701 aa, Neisseria sp.
MQDEIGEAFSLFKTDEDIRGRLKGKLPDEQLDALLEYVSFDKFVQLSLKALRKILPLMEQGKRYDEACAEIYGDHYGIKDDKQAQFLPPVSADEIRNPVVLRALSQARKVVNAVVRRYGSPARVHIETAREVGKSFLDRKKIEKRQEENRKDRERSIAKFREYFPNFVGEPKAKDILKMRLYEQQQGQCLYSGKAIDLRRLNEKGYVEIDHALPFSRTWDDSFNNKVLVLAGENQNKRNQTPFEWLGGDEKRWREFTARVEHCRFPRSKKQRILMQKLDEKDFKERNLNDTRYVNRFLCNFIAQNMLLTGEDKNRVFASNGQITNLLRGMWGLKKVRESNDRHHALDAVVVACSTVAMQQKITNYVRQKEMNVFDGEMVDKTTGEVSRLHFPQPWDFFRQEVMMRVFGKPDTPSENNEEADTPEKLRALLADKLSSRPEAVHEAVTPLFVSRAPSRKMSGQGHMETIKSAKRLSEGKSVLRVPLTQLTPKLLENMVNREREPQLYEDLLGRLNAHGGDPAKAFAAPFFKRDKAGNPTQQVKAVRVEDVQKSGVIVREGNGVADNATMVRVDVFEKGGKYYLMPIYTWQAAKGILPNKAVIAHTDEANWQEMDTSFTFKFALYPNDLVLASLKKETYFGYFAGLDRSTGNISLRVHDLEKSKGKDGVYRIGVKTALSFQKYQVDELGKTIRPCRLKKRPPVR

SEQ ID NO: 1109 - protein, 1089 aa, Neisseria sp.
MTAFKPNPLNYILGLDIGIASVGWAMVEIDDKENPVRLIDLGVRVFERAEMPKTGDSLAAARRLARSVRRLTRRRAHRLLRARRLLKHEGVLKPEDFDENGLVKPLPYIPKQPRNTPWQLRAAALDRKLTPLEWAAVLLHLVKHRGYLSQRKNEGETDDKELGALLKGVADNTHALQAGNFRTPAELALNKFEKESGHIRNQRGDYSHTFSRKDLQAELVLLFEKQKEFGNPYVSDDLKNGIENLLMTQRPALSGDAIQKMLGHCTFEPAEPKAAKNTYTAERFIWLTKLNNLRILNQGNERPLTDAERTTLMDEPYKKSKLTYAQARKLLDLDDTAFFKGLRYGKDNAESATLMEMKAYHAISRALEKEGLKDKKSPLSLSPELQDEIGTAFSLFKTDEEITGRLKGCLQPEILDALLKHISFDKFVQISLKALRRIVPLMEQGKRYDEACAEIYGDHHGRRNSEETLYLPPIPADEIRNPVVLRALSQARKVINGVGRRYGSPARIHIETAREVGKSFKDRKEIEKRQEENRKDREKAAAEFQEYFPNFVGEPKSKDILKLRLYRQQNCKCLYSGKEINLGRLNEKGYVEIDHALPFSRTWDDSFNNKVLVLGSENQNKGNRTPYEYLNGKDNSREWQEFKARVETSRFPHSKKQRILLQKFDEEGFKERNLNDTRYVNRFLCKFVADHMQLTGKGKRRVFASNGQITNLLRGFWGLRKVRAENDRHHALDAVVVACSTVAMQQRITRFVRYKEMNAFDGKTVDKETGEVLHQKTHFPQPWEFFAQEVMIRVFGKPDGKPELEEADTPEKLRALLAEKLSSRPEAVHEYVAPLFVSRAPNRKMSGQGHMETIKSPKRLDEGISVVRVPLTQLKLKDLEKMVNREREPKLYEALKARLEAHKDDPAKAFAEPFYKQDKAGNRTQQVKAVRIEQVQKTGVWVRNQNGIADNATMVRVDVFEKGGKYYLVPIYSWQVAKGILPDKAIIAFKDEEEWQLIDDSFNFKFPLHPNDLVEVITKKARIFGYFASCHRGTGNINIRIHDLDNKVGKNGILEGIGVKTALSFQKYQIDELGKEIRPCRLKKRPPVR

SEQ ID NO: 1110 - protein, 1097 aa, Neisseria wadsworthii
MKKQPQRYILGLDLGIASVGWALILVDGAENPVGLLDCGVRTFERAEVPKTGDSLALARRQARSVRRLIRRRAHRLLRLRRLLKREGILSAADFNSDGLPNLPIDAWQLRVAGLERKLTNQEWAAVLLHLVKHRGYLSQRKSETQTENKELGRLLAGVAENSKLLSESSEQYRTPAELAVKLFAEQSGHLRNKGGEYTHTFNRLDLQKELHLLFERQYALGNPFASAELQSKVDELLMTQRSALQGEAVLKMLGKCTFEPSEYKAAKNTYSAERFIWLTKLNNLRILYNGEERALDEGDRKKLLDEPYKKAKLTYKQVRSILNLPESAVFKGLRYGKDSDGLKAENGTLMEMKAYHKIRTILDKAGLKGEWENRIRNPEILDKIGTAFSLYKTDEDIQAALADLRLPENVLDALLAGLNFDKFIQLSLKALRNILPLMERGIRYDEACKEVYGDHRALAESKNQVLLPPIPADEIRNPVVLRTLTQARKVINAIIRRYGSPQRVHIETARELGKSKQERDKIDRKNKENQNDRNRLASDIRKHFNFEPTPKDILKLRLYEQQHGKCLYSDLREEKGECLYTGNVIELHRLFEDGYVEIDHALPLSRTWDNSLNNKVLVLKSSNQNKGNKTPYEWLDGANNSRRWREFQARVQGCHFPYVKKQRIQTAKLDSKAEQGFLERNLNDTRYISKFMCQFITANLRLAETSNALMEEVAGENPYWKERKRQRVFAPSGSIIALLRGLWGLKKVREDNDRHHALDAIVVACSTVSMQQKITKAMQRRETLETVDSETGEVKTRIPQPWDFFRQEVMIRVFSDSPREELAEKLNSRPEALHDFVSPLFVSRAPNRKMTGQGHLETVKSAKRLSENISVVRKPLTALKLKDIENIVGYPDREPALYQALRERLLAHKDDPVKAFADKPFYKPAKDGGQGSLVKAVRIIENTKHGLKIRNGITDTNGDMVRTDVYQKTDKKGKRQYFIVPVYAWQVEKNELPTVDCKGYEIDDNYEFCFSLYKYDLIEIQNPNDINQELRAYYINCDSSDGRFWLAYHDKSAKEQQFRISTQNQPIIKKYQVDTLGKEIRLCKAEKRTALNGKKKK

SEQ ID NO: 1111 - protein, 1426 aa, Niabella soli
MPRKNILGLDLGTTSIGFAKIIEDDDYQCSSVELIGVRVNPLTTDEQTNFEKGKPVSVNADRTLKRGMRRNLDRYQLRRDYLIEILRTHHIITADTKLAEDGKNTTHTTYALRALAATAEIPLEAFVRVLLAINKKRGYKSSRKAKNEDEGQLIDGMAIARRLYEESLTPGQFSYQLLKEGKKYLPDFYRSDLNTELNKVWNFQKQFYPEILTDEFKRHLEGKGQRATAVAFWGQHGFSMAENKGSREEKKLHAYKWRSEAAHKQLTKEEVAFVITEINNDLNKSSGYLGAISDRSKELFFNKQTVGQYLHQQLKENPHTRLKGQVFYRQDYLDEFETIWEMQAKFYSALTLELKEEVRDVVIFYQRKLKSQMGLISLCEFESKEIEIEKNGEKAKKRIGLRVAPKSSPLFQEFKIWQVLNNLEFRNKKTKEVFVPEMAAKQQLFDELNIKGNLLASEAIKILGYKTKDWEANYHTLEGNRTNKSLYDAWLKILELEGYDENLLKLSGSDDIDVSKIEKPALEIRQMVLAVFEVLGISGAILDFDAEADGKAFEQQPAYQLWHLLYSAEDDGKKYSQEDIFTYGHDNIGLKKKLCEKFGFRPEHTKILVNVVFSDDYGNLSSKAMRRIYPFIKELTYDKACAEAGYRHSAASLTKEEIAARPLQNRLDLLKKNELRSPVVEKILNQMVNVVNTLVDDENQNRKARGLSEDFHFDEIRIELARELKKNAKERAEMTTNINTAKQSHEKIIRILQTEFGVPNPSRNDIVRYKLYEELKNNGYKDLYTNTYISRDILFSKQIDVDHIIPQMSLFDDSFSNKTVVFRKDNQDKGNKTAYDYILGKYGEQALEEYISRITSLFELGKKNKEEGIGKAKFQKLQKRLVDIGDGFIERDLRESQYIAKKANNMLYAICRSVVSTSGEITARLREDWDLVNVMQEINLPKFRALGLTEMVEKKDGAQKERITDWTKRNDHRHHAMDALAIAFTRHSHIQYLNHLNARKDEANKWHPVVSKIEEKETVLIYDDLGNRKRKFKAPMPNFREVVKEHLENVLISHKAKNKVVTKNKNKIKTVRGEKVKTELTPRGQLHKETIYGRYRYYESKEEKIGPKFDAEMIGMVTNPQYKKLLLERLAANGNDPKKAFWGKNALNKNPLYVDEARQELLPEKILLRWLNDDYSIRKDVTPENLKDIKTIEKILDKGVKKILLKRLADFGNDPKKAFSDLDKNPIWQNEAKRIAIKRVTISGIKNAAPLHHKKDHLGNDILDEKGKQIPSSFVSTGNNHHVAIYRDAEGNLQERVVSLFDAVQLVNGGEPVIDKEYNKGIGWQFLFTMKQNEMFVFPDEKTGFNPREVDLLSSGNRKLISPNLFRVQKLASKNYFFRHHLETSVEEKKELKNIAYKPQLGLNALSNIVKVRINHIGEIVSVGEY

SEQ ID NO: 1112 - protein, 79 aa, Nitritalea halalkaliphila
MPLRLPERVYKMISSTGAECHFLPVNVSSLIKGYDAKSKLGEFGSQNKQEVTSDSFIRVKERCYKLEINRLGIPLNRLK

SEQ ID NO: 1113 - protein, 1498 aa, Odoribacter laneus
METTLGIDLGTNSIGLALVDQEEHQILYSGVRIFPEGINKDTIGLGEKEESRNATRRAKRQMRRQYFRKKLRKAKLLELLIAYDMCPLKPEDVRRWKNWDKQQKSTVRQFPDTPAFREWLKQNPYELRKQAVTEDVTRPELGRILYQMIQRRGFLSSRKGKEEGKIFTGKDRMVGIDETRKNLQKQTLGAYLYDIAPKNGEKYRFRTERVRARYTLRDMYIREFEIIWQRQAGHLGLAHEQATRKKNIFLEGSATNVRNSKLITHLQAKYGRGHVLIEDTRITVTFQLPLKEVLGGKIEIEEEQLKFKSNESVLFWQRPLRSQKSLLSKCVFEGRNFYDPVHQKWIIAGPTPAPLSHPEFEEFRAYQFINNIIYGKNEHLTAIQREAVFELMCTESKDFNFEKIPKHLKLFEKFNFDDTTKVPACTTISQLRKLFPHPVWEEKREEIWHCFYFYDDNTLLFEKLQKDYALQTNDLEKIKKIRLSESYGNVSLKAIRRINPYLKKGYAYSTAVLLGGIRNSFGKRFEYFKEYEPEIEKAVCRILKEKNAEGEVIRKIKDYLVHNRFGFAKNDRAFQKLYHHSQAITTQAQKERLPETGNLRNPIVQQGLNELRRTVNKLLATCREKYGPSFKFDHIHVEMGRELRSSKTEREKQSRQIRENEKKNEAAKVKLAEYGLKAYRDNIQKYLLYKEIEEKGGTVCCPYTGKTLNISHTLGSDNSVQIEHIIPYSISLDDSLANKTLCDATFNREKGELTPYDFYQKDPSPEKWGASSWEEIEDRAFRLLPYAKAQRFIRRKPQESNEFISRQLNDTRYISKKAVEYLSAICSDVKAFPGQLTAELRHLWGLNNILQSAPDITFPLPVSATENHREYYVITNEQNEVIRLFPKQGETPRTEKGELLLTGEVERKVFRCKGMQEFQTDVSDGKYWRRIKLSSSVTWSPLFAPKPISADGQIVLKGRIEKGVFVCNQLKQKLKTGLPDGSYWISLPVISQTFKEGESVNNSKLTSQQVQLFGRVREGIFRCHNYQCPASGADGNFWCTLDTDTAQPAFTPIKNAPPGVGGGQIILTGDVDDKGIFHADDDLHYELPASLPKGKYYGIFTVESCDPTLIPIELSAPKTSKGENLIEGNIWVDEHTGEVRFDPKKNREDQRHHAIDAIVIALSSQSLFQRLSTYNARRENKKRGLDSTEHFPSPWPGFAQDVRQSVVPLLVSYKQNPKTLCKISKTLYKDGKKIHSCGNAVRGQLHKETVYGQRTAPGATEKSYHIRKDIRELKTSKHIGKVVDITIRQMLLKHLQENYHIDITQEFNIPSNAFFKEGVYRIFLPNKHGEPVPIKKIRMKEELGNAERLKDNINQYVNPRNNHHVMIYQDADGNLKEEIVSFWSVIERQNQGQPIYQLPREGRNIVSILQINDTFLIGLKEEEPEVYRNDLSTLSKHLYRVQKLSGMYYTFRHHLASTLNNEREEFRIQSLEAWKRANPVKVQIDEIGRITFLNGPLC

SEQ ID NO: 1114 - protein, 1389 aa, Oenococcus kitaharae; identical to SEQ ID NO: 236

SEQ ID NO: 1115 - protein, 1535 aa, Ornithobacterium rhinotracheale
MNTILGLDLGTNSIGWALIKVLNDKTRLPLEIIDLGVVVIPTDQRTLDKFSKGESISKTAERTKQKGVRKLYERKKLRRERLHRVLNILGFLPEHYSKKIDFKKHLGQFFGNSQPKISYVENDHGKHEFIFMDSYREMLKEFSKHNIKNVPYDWTIYYLRKKALSQKISKEELAWVILNFNKKRGYYQFRDDNADENKENKIEKYYALKVTNVKKEDAQNYTITLENGWIYKNKSKISLLDWVGSTKEFISTEKFDNKGNIIKKKNGEDDRTLKLVDSEKDWIAIKKSTEDRIENYGKTVGTYLYEHLLKDPNQKLNGELINIIDRKFYKNELKQILEKQKEFHPELLNEDLFQKSIIELYPKNSTRQKELKNKDLCYLLIDDVIYYQRDLKKKNSTINKCSFESREYYLNGEKQIQKINCIAKSKPLYQEFRTLQFIKNLKVYEIIDGLEKDITSKLLPDFETKEHFFEWLNDKEKIDQLQLLSYKCFDLHDNVKNDLIAKGIKRPTEKAIRTELLEKYRWNYSKDNDRNFLLNETRFKILKYLKKVDKKLTLTNEQIESLWLLLYSAKDERELKNGLQKFSEKNKLPKKFSDIFISFPPFKKEYGAYSEKALKKLLSLVRFGKYWSFNKIDNNIQNKIMNILNGEVDDSISDRVREKTILLQDKNDFQDLPLWLASYVAYNRFSEVSEIKYWDSPDKIEFLKQHSIGNPIVEKIINETLKLIKDIWVIHGKSCKNFFSEIHIELSREIKSSSKKRAQITNNNTKNQKLNNLIKSLLIEMASDTKYENVTPYSPSQQEILKIYDEGIYSKEENSEKIKEINKIRNNNKISKSDITKYKLWLEQGYISPYTGKIIPLTKLFTAKYQKEHIIPQTKFFDDSFNNKVICEAEVNKLKDNSLAMNFIKAKGGKAVKLSDGETVTILNQEEYKQLVRTSFKKNSIKLRNLLLEEIPDTFTKRQLNDTKYISKLVLSLLSNIVREKGELESTAKRIVSTNGQITSILRNDWGLNNIWNKLITPRFERLNNINKNKIYGNWENKKGKNVFQINYLNDNLSTLNTKRIDHRHHALDALIVACTTRNHINFLNNQYAKSRNQRHDLRAKLKRRETITTEGSKKQVFKDFIKPWESFTQDALKKLETTIVNFKVNKRIINKTINWYKKWEKQKDGTYKKIQKKQTKGDAWAIRKPLHIDTIYGIVCKKLPLKSALENYKNIIDENLKHKIKELKEVNKFDNNQIINFFKECNFIFEDNNIQKVEVYDFKDNRDKTILSSSRQLIDESFTPKKIGKVLDPTIRNILLKHLNSTKYNNKFDSDGNPIKPEKLAFSPEGLKDLNKNIKHLNNNKEHQPIKRVKLFETLGNKIKVGYTQQKNKKFAETATGTNLFLGIYSDNNKRDFKTIPLILAIQREKEGLNPCPDTDEKGNQLLFSLSPNELVFVPNNEERKNPNLVDFENLSKDQIDRIYKFVSCTGSEAYFVPSRTAKPIIENENGTNNKSQRIIEFNEKTSIKNEKNEPVLIKTICWKIEVNRLGKIIKVIK

SEQ ID NO: 1116 - protein, 103 aa, Parabacteroides merdae
MIVYRLFYRFLFKATKLVNFVIHKELKRQIARTGKIKFHSGGCGCQSGNYKMQNFEKGKSITTNADRTLKRSMRRNLYRCKLRRDVLIELLKKVGFIPEKQWK

SEQ ID NO: 1117 - protein, 82 aa, Parabacteroides merdae
MSIWKLQYPPLDLKIYNKFLVYSRVNPLTVDEMQNFEKGKSITTNADRTLKRSMRRNLQRYKLRRDVLIELLKKVGFMSEKQ

SEQ ID NO: 1118 - protein, 84 aa, Parabacteroides merdae
MSIWKLQYPPLDLKIYNKFLVYSRVNPLTVDEMQNFEKGKSITTNADRTLKRSMRRNLYRCKLRRDVLIELLKKVGFIPEKQWK

SEQ ID NO: 1119 - protein, 398 aa, Pasteurella bettyae
MLANENQNKGNLTPYEWLDGKNNSKRWQDFVARVQTCCFSHRKKQHILSHKLDEKSFIERNLNDTRYVARFLCNFIADNMLLTGKGKRKVFASNGQITALLRGRWGLQKVRDDNDRHHALDAVVIACSTVAMQQKITRFVKYEEGNVFSGERIDRETGEIIPLYFPTPWKFFKENVEIRIFSENPKLELENRLPDYPQYNHEFVQPLFVSRMPTRKMTGQGHMETIKSAKRLDEGISVLKVPLTQLKLADLENMVNRERELALYEALKERLELFGNDPAKAFIEPFYKKGGALVKAVRVKKVQKSGVLVRDGNGVADNALMVRVDVFTKGGKYFLVPIYTWQVAKGILPNKAVTANIDEIDWLEMDESYQFIFTMYPNDLVKVKLKKEEFFGYYGGLD

SEQ ID NO: 1120 - protein, 610 aa, Pasteurella bettyae
MNMLKPLNYILGLDLGIGSVGWAVVEIDEQGNPLRLIDVGVRTFERAEVAKTGESLALARRLARSSRRLVKRRAARIKKAKRLLKAENILLSVDEILPNDVWQLRVKGLDHKLERQEWAAVLLHLLKRRGYLSQRKNESKSENKELGALLSGVVTNHQILQTDEYRTPAEIAVHKFQAEDGHIRNQRGDYTHTFSRLDLLAEMELLFQRQTELGNLHTSSKLLENLTALLMWQKPALAGEAILKMLGKCTFEPTEYKAAKNSYSAERFVWLTKLNNLRILEQGAERALTDSERFVLLDQPYEKAKLTYAQVRTLLKLSDEAIFKGVRYQGEDKKTVESKTTLMEMKAYHQIRKALDGADLKDEWNTLKNDSALLDEIGTAFSLYKTDDDISHYLGGKLSEKVLNVLLENLNFDKFIQLSLKALQKILPLMLQGQRYDEAVSAVYGDHYGKKSAESCRLLPAIPANEIHNPVVLRTLTQARKVINAVVRLYGSPARIHIETGRKVGKSYQDRKKLEKQQEENREQRESAVKKFKEYFPNFVGEPKGKDILKLRLYELQQSKCLYSGKSFDPNRLLEKGYVEVDHALPFSRTWDDSFNNKVCLPMKTRIKAI

SEQ ID NO: 1121 - protein, 199 aa, Pasteurella multocida
MACATPSMQQKITRFIRFKEVHPYKIENRYEMVDQESGEIISPHFPEPWAYFRQEVNIRVFDNHPDTVLKEMLPDRPQANHQFVQPLFVSRAPTRKMSGQGHMETIKSAKRLAEGISVLRIPLTQLKPNLLENMVNKEREPALYAGLKARLAEFNQDPAKAFTTPFYKQGGQQVKAIRVEQVQKSGVLVRENNGVADNA

SEQ ID NO: 1122 - protein, 63 aa, Pasteurella multocida
MQTTNLSYILGLDLGIASVGWAVVEINENEDPIGLIDVGVRIFERAEVPKTGESLALSRRLAR

SEQ ID NO: 1123 - protein, 1058 aa, Pasteurella multocida
MQTTNLSYILGLDLGIASVGWAVVEINENEDPIGLIDVGVRIFERAEVPKTGESLALSRRLARSTRRLIRRRAHRLLLAKRFLKREGILSTTDLEKGLPNQAWELRVAGLERRLSAIEWGAVLLHLIKHRGYLSKRKNESQTNNKELGALLSGVAQNHQLLQSDDYRTPAELALKKFAKEEGHIRNQRGAYTHTFNRLDLLAELNLLFAQQHQFGNPHCKEHIQQYMTELLMWQKPALSGEAILKMLGKCTHEKNEFKAAKHTYSAERFVWLTKLNNLRILEDGAERALNEEERQLLINHPYEKSKLTYAQVRKLLGLSEQAIFKHLRYSKESAESATFMELKAWHAIRKALENQGLKDTWQDLAKKPDLLDEIGTAFSLYKTDEDIQQYLEGKLPDSVINALLVSLNFDKFIELSLKSLRKILPLMEQGKRYDQACHEIYGHHYGEKNQQISQLLPVIPTQEIRNPVVLRTLSQARKVINAIIRQYGSPARVHIETGRELGKSFKERREIQKQQEDNRTKRESAVQKFKELFSDFSSEPKSKDILKFRLYEQQHGKCLYSGKEINIHRLNEKGYVEIDHALPFSRTWDDSFNNKVLVLASENQNKGNQTPYEWLQGKINSERWKNFVALVLGSQCSAAKKQRLLTQVIDDNKFIDRNLNDTRYIARFLSNYIQENLLLVGKNKKNVFTPNGQITALLRSRWGLIKVRENNDRHHALDAIVVACATPSMQQKITRFIRFKEVHPYKIENRYEMVDQESGEIISPHFPEPWAYFRQEVNIRVFDNHPDTVLKEMLPDRPQANHQFVQPLFVSRAPTRKMSGQGHMETIKSAKRLAEGISVLRIPLTQLKPNLLENMVNKEREPALYVGLKARLAEFNQDPAKAFATPFYKQGGQQVKAIRVELVQKSGVLVRQGNGVADNAPGSIVRTDVFIKNNKFFLVPIYTWQVAKGILPNKAIVAHKNEDEWEEMDEGAKFKFSIFPNDLIELRTKTECFLGYYIGPDRHNGSISLREHDSEISKGNAGVYRVGVKLALSLEKYHIDELGKNRRICRPHQRRPVR

SEQ ID NO: 1124 - protein, 1056 aa, Pasteurella multocida
MQTTNLSYILGLDLGIASVGWAVVEINENEDPIGLIDVGVRIFERAEVPKTGESLALSRRLARSTRRLIRRRARRLLLAKRFLKREGILSTTDLEKGLPNQAWELRVAGLERRLSAIEWGAVLLHLIKHRGYLSKRKNESQTNNKELGALLSGVAQNHQLLQSDDYRTPAELALKKFAKEEGHIRNQRGAYTHTFNRLDLLAELNLLFAQQHQFGNPHCKEHIQQYMTELLMWQKPALSGEAILKMLGKCTHEKNEFKAAKHTYSAERFVWLTKLNNLRILEDGAERALNEEERQLLINHPYEKSKLTYAQVRKLLGLSEQAIFKHLRYSKENAESATFMELKAWHAIRKALENQGLKDTWQDLAKKPDLLDEIGTAFSLYKTDEDIQQYLTNKVPNSVINALLVFLNFDKFIELALKSLRKILPLMEQGKRYDQACREIYGHHYGEANQKTSQLLPAIPAQEIRNPVVLRTLSQARKVINAIIRQYGSPARVHIETGRELGKSFKERREIQKQQEDNRTKRESAVQKFKELFSDFSSEPKSKDILKFRLYEQQHGKCLYSGKEINIHRLNEKGYVEIDHALPFSRTWDDSFNNKVLVLASENQNKGNQTPYEWLQGKINSERWKNFVALVLGSQCSAAKKQRLLTQVIDDNKFIDRNLNDTRYIARFLSNYIQENLLLVGKNKKNVFTPNGQITALLRSRWGLIKIRENNDRHHALDAIVVACATPSMQQKITRFIRFKEVHPYKIENRYEMVDQESGEIISPHFPEPWAYFRQEVNIRVFDNHPDTVLKEMLPDRPQANHQFVQPLFVSRAPTRKMSGQGHMETIKSAKRLAEGISVLRIPLTQLKPNLLENMVNKEREPALYAGLKARLAEFNQDPAKAFTTPFYKQGGQQVKAIRVEQVQKSGVLVRENNGVADNASIVRTDVFIKNNKFFLVPIYTWQVAKGILPNKAIVAHKNEDEWEEMDEGAKFKFSLFPNDLVELKTKKEYFFGYYIGLDRATGNISLKEHDGEISKGKDGVYRVGVKLALSFEKYQVDELGKNRQICRPQQRQPVR

SEQ ID NO: 1125 - protein, 134 aa, Pasteurella multocida
MVNKEREPALYAGLKARLAEFNQDPAKAFTTPFYKQGGQQVKAIRVEQVQKSGVLVRENNGVADNASIVRTDVFIKNNKFFLVPIYTWQVAKGILPNKAIVAHKNEDEWEEMDEGAKFKFSLFPNDLVELKTKK

SEQ ID NO: 1126 - protein, 53 aa, Pasteurella multocida
YSKENAESATFMELKAWHAIRKALENQGLKDTWQDLAKKPDLLDEIGTAFSLL

SEQ ID NO: 1127 - protein, 1366 aa, Pediococcus acidilactici
MGDRKYNLGLDIGTSSIGFAAVDENNQPIRVKGKTAIGVRLFEEGKTAADRRGFRTTRRRLSRRRWRINLLNEIFDAHLAEVDPTFLARLKESNRSNLDPKKSFQGSLLFPERKDYQFYEEYPTIYHLRKALMEEDRKFDIREIYLAVHHIIKYRGNFLNGTPMRSFKVENIELDTLFDQLNQLYAEIVPDNELAFDLAQVADVKDVLSSTTIYKMDKKKQLVKMMLLPASNKALQSENKKIVTQFVNAILNYKFKLDVLLQVETDADWSLKLNDEGADDKLEEFTGDLDENRLEIIDLLQRLHNWFSLNEITKDGNSLSAAMVEKYENHHHHLGLLKKVIENHPDAKKAKALKETYTAYVGKTDDKTQNQDDFYKAVEKNLDDSPDAKEIKRLIQLDQFMPKQRTGQNGAIPHQLHQQELDQIIEKQSKYYPFLAEPNPNVKRRKDAPYKLDELIAFKIPYYVGPLVTPEEQAQNKENVFAWMKRKAAGPITPWNFDEKVDRMESANRFIRRMTTKDTYLFGEDVLPAESMIYQKFVVLNELNNLKINGRHLSLKDKQDVYNDLFKQQKTVSIKALQNYYVTKKKAATAPTVGGLADPKKFLSSLSTYIDFKNMFGERVNDPQFQEDLEQIVEWSTIFEDRGIFKAKLQALGWLSEKQIQQLVAKRYKGWGRLSKKLLTGLKNAEGYSILDEMWRSTENFMQIQTRPEFAALIQQANEKQFEGNDPNNVWENIESILGDAYTSPQNKKAIRQVVKVVQDIEKAVGNPPEKIAIEFTREAAANPQRTQSRLRTLEKLYESAEEVVDAGLTAELAEFKENKHVLSDKYYLYFTQLGRDVYTGDTISLDKLNDYDVDHILPQSFIKDDSLDNRVLTIRAVNNGKSDNVPAKMFGKKMGSFWRYLLDNGMISKRKYNNLITDPDNISKYAQKGFINRQLVETSQVIKLTANILNGIYDKDTEIIEVPAKMNSQMRKMFDLVKVREVNDYHHAFDAYLTIFIGKYLYKCYPKLRPYFVYGKFKKFGDNEDIEVGDGRFNFLNRIERLKNVTDPETGEILWSNVAPNETIKQIKKVYNYKFMLVSRETTTRRAELFNQTVYPKNYRGKLIPIKEDRPTDLYGGYSGNTDAYLAIVALEDKKKGKYFKVVGIPTRAAAKLEKLKQQDSQQYLQALHKVIAPQFTKSTKKGIKKTEFEIVLDKVHYRQLVQDGPVKMMLGSSTYKYNAKQLVLSEKALQVIADDRKFDETQKDDNLIAVYDEILSIVNQSFDLYDINGFRKKLNDNRDQFIDLPAETKYEGRKVVAHGKREMILEILKGLHANAAFGNLKPIGFSTAFGQLQVPNGIILSKNAILIHQSPSGLFERKIKLSDL

SEQ ID NO: 1128 - protein, 1229 aa, Pediococcus acidilactici; identical to SEQ ID NO: 125

SEQ ID NO: 1129 - protein, 270 aa, Pediococcus lolii
LFNQTIYSAKASKTMIPIKNDRPTKLYGGYSGNEDAYMSIIRLSDKKKTYKVVGISMRDASKLKAYENNAHEEYLKKLKEVIEQQFLDSGKKTKADFEIVIPKVNYHQRMQDGTKQFRIGSSKYVHNTKQLVLSEKTLKAIRNNKQYNGDAEKDLINAFDEILTIVNDSFSIFDIRSFRKKLNESRDKFVSLPVEDTKEKSKVIKGKRETLKQILIALHANGTSQDIPQLGLKSFGKMVKTGGLTLSENTALIHQSPSGLFEHKIKLSDL

SEQ ID NO: 1130 - protein, 1016 aa, Pediococcus lolii
MNGIFDAHLAEVDPTFLARLKESNRSNLDPKKSFQGSLLFPERKDYQFYKEYPTIYHLRKALMEKDRKFDIREIYLAVHHIIKYRGNFLNGTPMRSFKVENIELDTLFDRLNQLYEEIIPDNELAFDLEQVADVKEVLSSTTIYKMDKKKQLVKMMLLPASNKALQSENKKIVTQFVNAILNYKFKLDVLLQVETDADWSLKLNDEGADDKLEEFTGDLDENRLEIIDLLQRLHNWFSLNEITKDGNSLSAAMVEKYKDHRHHLELLKKVIEDHSDAKKAKALKETYTAYVGKTDDKTQNKDDFYKAVEKNLDDSPEAKEIKRLIQLDQFMPKQRTGQNGAIPHQLHQQELDQIIEKQSKYYPFLAEPNPNVKRRKDAPYKLDELIAFKIPYYVGPLVTPEEQAQNKENVFAWMKRKAAGPITPWNFDEKVDRMESANRFIRRMTTKDTYLFGEDVLPAESMIYEKFVVLNELNNLKINGRHLSLKDKQDIYNDLFKQQKTVSIKALQNYYVTKKKAATAPTVGGLADPKKFLSSLSTYIDFKNMFGERVNDPQFQEDLEQIVEWSTIFEDRGIFKAKLQALGWLSEKQIQQLVAKRYKGWGRLSKKLLTGLKNAEGYSILDEMWHSTENFMQIQTRPEFAALIQQANEKQFEGNDPDNVWENIENILGDAYTSPQNKKAIRQVVKVVQDIEKAVGNPPEKIAIEFTREAAANPQRTQSRLRTLEKLYESAEEVVDAGLTAELAEFKENKHVLSDKYYLYFTQLGRDVYTGDTISLDRLNDYDVDHILPQSFIKDDSLDNRVLTIRAVNNGKSDNVPAKMFGKKMGSFWRYLLDNGMISKRKYNNLITDPDNISKYAQKGFINRQLVETSQVIKLTANILNGIYDKDTEIIEVPAKMNSQMRKMFDLVKVREVNDYHHAFDAYLTIFIGNYLYKCYPKLRPYFVYDNFKKFGNKEDIGHKRFNFLGKIERDKKVVAPETGEILWSNVAPNETIKQIKKVYDYKFMLTSHETYTKHG

SEQ ID NO: 1131 - protein, 1333 aa, Planococcus antarcticus
MKNYTIGLDIGVASVGWVCIDENYKILNYNNRHAFGVHEFESAESAAGRRLKRGMRRRYNRRKKRLQLLQSLFDSYITDSGFFSKTDSQHFWKNNNEFENRSLTEVLSSLRISSRKYPTIYHLRSDLIESNKKMDLRLVYLALHNLVKYRGHFLQEGNWSEAASAEGMDDQLLELVTRYAELENLSPLDLSESQWKAAETLLLNRNLTKTDQSKELTAMFGKEYEPFCKLVAGLGVSLHQLFPSSEQALAYKETKTKVQLSNENVEEVMELLLEEESALLEAVQPFYQQVVLYELLKGETYVAKAKVSAFKQYQKDMASLKNLLDKTFGEKVYRSYFISDKNSQREYQKSHKVEVLCKLDQFNKEAKFAETFYKDLKKLLEDKSKTSIGTTEKDEMLRIIKAIDSNQFLQKQKGIQNAAIPHQNSLYEAEKILRNQQAHYPFITTEWIEKVKQILAFRIPYYIGPLVKDTTQSPFSWVERKGDAPITPWNFDEQIDKAASAEAFISRMRKTCTYLKGQEVLPKSSLTYERFEVLNELNGIQLRTTGAESDFRHRLSYEMKCWIIDNVFKQYKTVSTKRLLQELKKSPYADELYDEHTGEIKEVFGTQKENAFATSLSGYISMKSILGAVVDDNPAMTEELIYWIAVFEDREILHLKIQEKYPSITDVQRQKLALVKLPGWGRFSRLLIDGLPLDEQGQSVLDHMEQYSSVFMEVLKNKGFGLEKKIQKMNQHQVDGTKKIRYEDIEELAGSPALKRGIWRSVKIVEELVSIFGEPANIVLEVAREDGEKKRTKSRKDQWEELTKTTLKNDPDLKSFIGEIKSQGDQRFNEQRFWLYVTQQGKCLYTGKALDIQNLSMYEVDHILPQNFVKDDSLDNLALVMPEANQRKNQVGQNKMPLEIIEANQQYAMRTLWERLHELKLISSGKLGRLKKPSFDEVDKDKFIARQLVETRQIIKHVRDLLDERFSKSDIHLVKAGIVSKFRRFSEIPKIRDYNNKHHAMDALFAAALIQSILGKYGKNFLAFDLSKKDRQKQWRSVKGSNKEFFLFKNFGNLRLQSPVTGEEVSGVEYMKHVYFELPWQTTKMTQTGDGMFYKESIFSPKVKQAKYVSPKTEKFVHDEVKNHSICLVEFTFMKKEKEVQETKFIDLKVIEHHQFLKEPESQLAKFLAEKETNSPIIHARIIRTIPKYQKIWIEHFPYYFISTRELHNARQFEISYELMEKVKQLSERSSVEELKIVFGLLIDQMNDNYPIYTKSSIQDRVQKFVDTQLYDFKSFEIGFEELKKAVAANAQRSDTFGSRISKKPKPEEVAIGYESITGLKYRKPRSVVGTKR

SEQ ID NO: 1132 - protein, 211 aa, Porphyromonas catoniae
MGKKVLGLDLGVGSIGWCLITLDKDEKPQSILGMGSRIVPLSADDATEFTQGKAITKNKMRTVARTIRKGMDRYQLRREALKKVLREHAMLPDEALIKLPLLELWELRARAATPGEQVSLTELGRVLLHINQKRGYKHAKADEAAEAETKKGKETGYVAQVKGRYQILKEKGLTIGQHFAGELRANQQTAPRGTYYTYRIKEQVYPRVRGV

SEQ ID NO: 1133 - protein, 1009 aa, Porphyromonas catoniae
MRIIREAYIEEYDRIMAVQRVFYPELLTDALIGRIRDRIIFYQRPLKSCKQLVSFCEFEKKEKVIRVKHTNKEGVQELVEKTITIGPKVAPKSSPIFQVCKVWESIHNIRLYHPDGTERKLEQEEKQKLFDYLQRNDKLSLTTLRKELKIKPKDKLWCDKLLEKGIAGNTTAAILRKAFKGYEHYERLFRFDLVRRDSHEADEDGVIRPIIDESYQNEPLYKLWHILYSIEDRAEMRSALIGQLGIKAEDLDNGLMDALYKIDFVKQGYGNKSAKFICKLLPHLQEGKMYSEAAEAAGMRHSDSMTAQERDERNLLEEIPLLQKNALRQPVVEKVLNQMINLVNALKREHGEIDEVRVELARELKMSREEREKATKNNSSREKENKAIAERITEYGLTPTKSRIQKYRLWQESAESCIYCGKRVDVVQFLRGEETEVEHIIPKSILFDDSLSNKACACRSCNQEKGNRFAMEYIQAKGWEQDYIERVDSLFHDKKISYSKRQHLLMLPKDLPEDFIERHLRLSQYISREAQGILRKGIRLVSASEGGVTAKLRQLWGYDNILRDLNLERYKSMGETEVVTVEHRDGQRTDERIKDWSKRKDHRHHAIDALVVACTRQSYIQRLNRVNAEADRQEMDAFIKEQQQEHKLSKKEKLSLLENWLKEQPHFTTGEVKEHAEGILISFRPGKRTVSRGRNIYKRSGKTDVQRNVLIPRGALSEETVYGVISVDGENKVVCKYPLQKFLDTKETNVDKIADQAAEKIVDKVLREKIRERIKRYGKKEAFAEPLYLDEAQTQVVRSVRCFISKDQAKLIPLRYNDESEAVGFVAPGNNHHLALYRDASGKMRASVVSFFAAVERARYGIPMIVLNPRETREKARIIPDLPESIFSKLPEEDWVLEETLQEGEMVLLGMENDAIEEAIKKKDYSKLSRYLYRVQSLSYNDYKFCFHLETESEKKEKKKGEDKKRGEKAKNTAVMPPKRYRIRCLATYQEDLNPRKVKIDLLGRISLA

SEQ ID NO: 1134 - protein, 1197 aa, Porphyromonas sp.
MLMSKHVLGLDLGVGSIGWCLIALDAQGDPAEILGMGSRVVPLNNATKAIEAFNAGAAFTASQERTARRTMRRGFARYQLRRYRLRRELEKVGMLPDAALIQLPLLELWELRERAATAGRRLTLPELGRVLCHINQKRGYRHVKSDAAAIVGDEGEKKKDSNSAYLAGIRANDEKLQAEHKTVGQYFAEQLRQNQSESPTGGISYRIKDQIFSRQCYIDEYDQIMAVQRVHYPDILTDEFIRMLRDEVIFMQRPLKSCKHLVSLCEFEKQERVMRVQQDDGKGGWQLVERRVKFGPKVAPKSSPLFQLCCIYEAVNNIRLTRPNGSPCDITPEERAKIVAHLQSSASLSFAALKKLLKEKALIADQLTSKSGLKGNSTRVALASALQPYPQYHHLLDMELETRMMTVQLTDEETGEVTEREVAVVTDSYVRKPLYRLWHILYSIEEREAMRRALITQLGMKEEDLDGGLLDQLYRLDFVKPGYGNKSAKFICKLLPQLQQGLGYSEACAAVGYRHSNSPTSEEITERTLLEKIPLLQRNELRQPLVEKILNQMINLVNALKAEYGIDEVRVELARELKMSREERERMARNNKDREERNKGVAAKIRECGLYPTKPRIQKYMLWKEAGRQCLYCGRSIEEEQCLREGGMEVEHIIPKSVLYDDSYGNKTCACRRCNKEKGNRTALEYIRAKGREAEYMKRINDLLKEKKISYSKHQRLRWLKEDIPSDFLERQLRLTQYISRQAMAILQQGIRRVSASEGGVTARLRSLWGYGKILHTLNLDRYDSMGETERVSREGEATEELHITNWSKRMDHRHHAIDALVVACTRQSYIQRLNRLSSEFGREDKKKEDQEAQEQQATETGRLSNLERWLTQRPHFSVRTVSDKVAEILISYRPGQRVVTRGRNIYRKKMADGREVSCVQRGVLVPRGELMEASFYGKILSQGRVRIVKRYPLHDLKGEVVDPHLRELITTYNQELKSREKGAPIPPLCLDKDKKQEVRSVRCYAKTLSLDKAIPMCFDEKGEPTAFVKSASNHHLALYRTPKGKLVESIVTFWDAVDRARYGIPLVITHPREVMEQVLQRGDIPEQVLSLLPPSDWVFVDSLQQDEMVVIGLSDEELQRALEAQNYRKISEHLYRVQKMSSSYYVFRYHLETSVADDKNTSGRIPKFHRVQSLKAYEERNIRKVRVDLLGRISLL

SEQ ID NO: 1135 - protein, 1422 aa, Prevotella denticola
MTQKVLGLDLGTNSIGSSVRNLDLSDDLKGQLEFFSSDIFRSSVNKESNGREYSLAAQRSAHSRSRGLNEARRRKLWATLDLLIKYGFCPMSPESLMRWRTYDKQRGLFREYPIDDKNFNAWILLDFDGDGKPDYSSPYQLRRELVIRQFDFDQPIERYKLGRALYHIAQHRGFKSSKGETLSQQETNSKQSLTDDTADVAGEMKASEEKLSKGLSTYMKENNLLTVGAAFAQLEDEGVRVRNNNDYRAIRSQFQREIETIFKFQQGLSVENELYERLVSEKKNIGTIFYKRPLRSQRGNVGKCTLERTKPRCAIGHPLFEKFRAWTLINNIKVRMSEEEQAEQLPMKLRFELYNDCFLAFVRAEFKFEDIRKYLEKRLGVHFSYNDKTINYKDSTSVAGCPITARFRKLLGEDWESFHVDGQKQRQAHGKNNASFHTVSYSTNDIWHFCYDAEEPEAVLSFAQDNLKWEKKKAEELVRIWSAIPQGYAMLSQKAIRNINKMLILGLKYSDAVLLAKVPEIVEITDGEILSVTEDYHRVEAQVGYEKQINNIVNALIAKYKSASEEYRFADHNYEYQLDKSDEKDIIKQIESNIGTRKWSLLDADEQTDILQKVRDKYQNFFRSHERKFVESPKLGECFEEYLMKKFPMVEGERWKKLYHPSQIAIYRPVPANKDRSALRLGNPDIGAIKNPTVLRVLNTLRKRVNQLLDDGIISPDETRVVVETARELNDANRKWALDTYNRIRHDENEKIKKILAEFYPKRDNISTVDIDKARYVIDQREMDYFTEAKTYHKDIKKYKLWLEQGGQCMYTGRTINLSNLFDPNSFDVEHTIPESISFDSSDMNLTLCDAHYNRFIKKNHIPADLPNYDKSVVIDGKEYSPIKPRLQRWADRVERLNRNVEYWRGQARRAQNKDRKDQCMREMHLWKMELEYWTKKLERFTITEVTDEFKNSQLVDTRVITRHAVLYLKSIFPHVDVQRGDVTAKFRKILGIQSVDEKKDRSLHSHHAIDATTLTIIPGAAKRERMLELFAKIEEVNKMLSFSGNEDRTGLKQELDGLKNQLNKEVKACRIGHNVSEIGTFINDNIIINHHVKNQALTPVRRRLRKRGHIVGGMDNPRWQTGDALRGEIHKASYYGAITQYAKDKEGKVLMKEGRPQINPTIKFVIRRELKYKKSSTDSGFASWDDLGKAIVDKELFALMKGQFPEGTSFKDACEQGIYMIKKGKNGEVDTKLYRIRHIRCKTKQKNALKIKEQAYKSEKEYKRYFYAAVGDLYAMCCYTNGKTREFKIYSLYDISCHRKVGVEDIPEFITDKKGNRLMLDYKLHTGDMILLYKENPEELYDLDNVSLSKLLYKINGFENDGLRIRMVNHLVAKEAMGESVKDYAKLPDIIRCGVKTIKFLVMGENRDFVIKNGKISFNHR

SEQ ID NO: 1136 - protein, 443 aa, Prevotella disiens
MELDYWKGKYNRFTMTEIPEGFSRRQGMGIGLISRYAGLYLKTIFHKKDNPQKSNVYIVKGSITAEFRRIWNIQDDYEKKCRDNHIHHCIDAIVVGCIGKREYDLMAQFYRDEEKYRWEKKKKPFFKKPWETFTQDMLSLKDEVLTVHFNPSNFTKKAHKKVFTPKGIFVAQGDCARVKLHKESYFGAIEQKGEIKYVMRKELSALKIEDIKNIVDAVVKEKVLAVVKKKGFKQAMAEPIYMNEDKRILIKKVRLFVSQTNPLIVKKHRDLSSKEYKQNYYVDNEGNLMIAMYEGVKKNGKIDREITVVNNLEAAKFFRQSQKNNAEKQLISHLSPKNGYPLKTVLTQKQLVLMYEDSPKEIKLRDTKNMVKRLYQVVEIEKDGRVKLKFHQEARSEGLNKNSAAFKIQDTPESLYRHTKSNLKVLVNGVDFKINILGEISLI

SEQ ID NO: 1137 - protein, 1375 aa, Prevotella histicola
MKKILGLDLGTTSIGWALVYESENTDEKSSIVRLGVRVNPLSVDEKGNFEKGKAITTNADRQQTHGARINLQRYKLRRENLKDCLQKQGWIGTEALCEEGKTSTFETYMLRAKAAEEEISLHELCRVLFMMNKKRGYKSNRKANNKEDGKLFDGMTVAKKLYEEHLTPAEYSFQLLSSGKKFKQEYYRSDLKEEFDRIWNEQQKYYPEILTDDFKQQLQGKSKGNTSKIFLGKYGIYSADLKGLDRKLQPLKWRVEALKQQVDKEVLAFVISDLNGQIASTSGLLGAISDRSKELYFNKQTVGQYLWTSLKETPHVSIKNKPFYRQDYLDEFEKIWETQATYHKELTPELKQEIRDIIIFYQRPLKSKKGLISVCELEQRKVKVTIDGKEKEISIGPKVAPKSSPMFQEFRIWQNLNNILLIDKGNNSIHPLYEEEKNLLYEELSVKEKLSKAEALKVLNKNSKQWDLNYKEIEGNRTQAVLYDCYNRIIVMTGHEEYNFKKLKASEIRSYVKTTFTGLGFNTDILEFDSSLTGHELEKQPMYQLWHLLYSYESDNSRTGNDALLRKLETAFGFPKEYAAVLSDVVFEDSYGNLSVKAMRKILPHLQAGLNYSQACEEAGYKHSRRSLTKNELDQKEYKEKLELLPKNSLHNPVVEKILNQMINVINAVIDEYGKPDEIRIELARELKIGAAERENMTRSINQGNAENKRIREILEKEFALSYISRNDIIKYKLYEELKSNGFKTLYSDTYISKDKLFSKDFDIEHIIPKARLFDDSLSNKTIEARDVNIAKSNKTAFDFISEKYDQQGIEAYKKKLDILLQDGSISKAKYNRLLMKEADIPSGFIDRDLRDTQYIAKKAYEILSDLVRNVTPTTGAVTSRLREDWQLVDVMKELNFEKYQKLGLVEVIEDRDGRKIKRIKDWTKRNDHRHHAMDALTIAFTKPSYIQYLNNLNARSDKNSSIYGIENKELHREDNKLRFNAPLPINEFRAEARRHLKSILVSVKAKNKVMTQNVNVIKTKHGVIKKVQLTPRGELHNATFYGTKKRPIIKMVKVGAALDEVTIKKVSSSFIREALLDRLHEYNGDAKKAFTGRNSIDKNPIYIDEEHKKTVPALVKTIEWEMYHPTRKLISPDLKIDKVIDKGIREILKTRLAKFNGDAQKAFSNLDENPIYKDEAKKITLKRVSLEGVSSVIPLHTLKDREGKLVVGKDGKPVLGDYVQTSNNHHIAFYMDENGNLQDNVVSFFEAAERKSQGVPVIDKNYNHDKGWNFLFTMKQNEYFVFPNEVTGFNPSEVDLMDEANYSIISPNLYRVQKMSKASGRDYWFRHHLEAMLNDDPKLRNSMFKRITSLKALEGIVKVRINCIGKIVAVGEYD

SEQ ID NO: 1138 - protein, 1380 aa, Prevotella intermedia
MKRILGLDLGTTSIGWALVNEAENNNEASSIVRLGVRVNPLTVDEKSNFEKGKAITTNADRQLRHGARINLQRYKLRRQNLHDCLQKQGWLGTEAMYEEGKASTFETYKLRAKAAEEEISLHEFARVLFMLNKKRGYKSNRKANNKEDGQLFDGMTIAKKLYEEHLTPAEYSLQLLNKGKKFTQGYYRSDLNAELERIWDEQKKYYPEILTDEFKQQLEGKTKTNTSKIFLAKYGIYSADLKGLDRKFQPLKWRVEALQQQVDKEVLAFVISDLKGQIANTSGLLGAISDRSKELYFNKQTVGQYLWASLEENPHISIKNKPFYRQDYLDEFEKIWETQAAFHKQLTPELKQEIRDIIIFYQRPLKSKKSLISVCELEQRKVKATIDGKEKEITIGPKVAPKSSPVFQEFRIWQNLNNVLLIDNDTNEKRPLDEVERNLLYKELSIKAKLSKTEALKILNKKGKQWDLNYRELEGNRTQAILFDCYNRIITLTGHEECDFKKIKASEIRHYVSTIFKNLGFSTEILDFDPSLKKHELEKQPMYQLWHLLYSYESDNSRTGNESLLRKLETTFGFPEEYATVLCDVVFEEDYGNLSVKAMREILPYLQAGNDYSQACAYAGYNHSRHSLTKEELDQKVYKERLELLPKNSLRNPVVEKILNQMINVINAIIDEYGKPDEIRIEMARELKSSAADRKKTTHAISQGNAENQRIREILEKEFSLSYISRNDIIKYKLYEELEPNYYKTLYSDTYITKDKLFSKDFDIEHIIPKARLFDDSFSNKTLEARNINLEKSNKTAFDFIKEKYGEDGAEAYKKKLDMLLENDAISRPKYNNLLRAEADIPSDFINRDLRNTQYIAKKACEILGELVKTVTPTTGKITNRLREDWQLVDVMKELNFEKYEKLGLTEIVEDRDGRKIKRIKDWTKRNDHRHHAMDALAIAFTKPSFIQYLNNLNARSNKGDSIYAIENKELHYEEGKLRFNAPIPVNEFRAEAKRHLSAILVSIKAKNKVMTQNVNKIKTKHGIIKKIQLTPRGPLHNETIYGTKMRPIIKMVKVGAALDEATINKVSSPAIREALLKRLNEYSGNAKKAFTGKNTLEKNPIYLNAGRTKTVPSLVKTVEWESFHPTRKLIDKDLNVDKVVDKGIREILKARLEEFNGDAKKAFSNLEENPIYLDEAKKIALKRVSIEGVLSAIPLHTLKNQAGKPITGKDGKPVLGNYVQTSNNHHIAFYYDEDGNLQDNAVSFFEAAERKSQGIPVIDKDYNRDKGWRFLFTMKQNEYFVFPNEATGFIPSEVDLTDEANYGIISPNLYRVQKVSRIDKGTSASRDYWFRHHLETILNDDAKLKNLAFKRIRGLLELKDIIKVRINSTGKIVAVGEYD

SEQ ID NO: 1139 - protein, 129 aa, Prevotella multiformis
MQKGGTGCKINRQTVGNVEVNVLNLRLYDRTDDREVTAGYLPTKEDYVRLFVYLNDRKEINQDTLLKDYFRLKKVKCGNEKEFAIRWNYIEDKEKKYPCNETRHELLAALDRAGMEHGWLDDSGTSARW

SEQ ID NO: 1140 - protein, 535 aa, Prevotella multiformis
MVKGLLSNIVRTAEEREETSKFVISCTGRITDRLKQDWGLNDVWNSLVYTRFKRLNELTETEAFGHWQDKDRRVFQTSVPLELQRGFSKKRIDHRHHAMDALVIACASRNIIGYLNNESAESPEKREDLRRKLCDKNHIIRKPWESFTQDARAALEDIVVSFKNYVRIINKATNYYERYDADGRKTKAEQKGGEMWAVRKPMHEATYYGKVNLRRKERVSLKAALEDIPSICNRDLRDYINGLVEKHFNKEQVLAQFRSVGNRWNKQHIDKVDVWRFSDGKEEMVATRKPLDTSFDAKRIEAVTDTGIQRILSNYLEAKGGDPKIAFTPEGIADMNQHITAYNNGKQHKPILKVRVSTKLGKKYPVGQTGCKAGQFVVAEAGTNLYFAVYEDGEGNRSYDTIPLNEAVECLKQGLPPVPETREKGDRLKFYLSPNDLVYVPAGDEENEIDRERIYKFVDSSGTTANFIPHRTAGLIYNVDKKLAEALCNGSIIQNEYGVGSQQSKNQKALTGEMVKAVCWKLEVDRLGNILRIIK

SEQ ID NO: 1141 - protein, 1380 aa, Prevotella nigrescens
MKRILGLDLGTTSIGWALVNEAESNNEASSIVRLGVRVNPLTVDEKSNFEKGKAITTNADRQLRHGARINLQRYKLRRQNLHDCLQKQGWLGTEAMYEEGKASTFETYKLRAKAAEEEISLHEFARVLFMLNKKRGYKSNRKANNKEDGQLFDGMTIAKKLYEEHLTPAEYSLQLLNKGKKFTQGYYRSDLNAELERIWDEQKKYYPEILTDEFKQQLEGKTKTNTSKIFLAKYGIYSADLKGLDRKLQPLKWRVEALKQQVDKEVLAFVISDLKGQIANTSGLLGAISDRSKELYFNKQTVGQYLWASLEENPHISIKNKPFYRQDYLDEFEKIWETQATFHKQLTPELKQEIRDIIIFYQRPLKSKKSLISVCELEQRKVKATIDGKEKEITIGPKVAPKSSPVFQEFRIWQNLNNVLLIDNDTNEKRPLDEDERYLLYKELSIKAKLSKTEALKILNKKGKQWDLNYKELEGNRTQAILFDCYNRIITLTGHEECDFKKIKASEIRHYVSTIFKNLGFSTEILDFDPSLEKHELEKQPMYQLWHLLYSYESDNSRTGNESLLRKLETTFGFPEEYATVLCDVVFEEDYGNLSVKAMRKILPYLQAGNDYSQACAYAGYNHSRHSLTKEELDQKVYKERLELLPKNSLRNPVVEKILNQMINVINAIIDEYGKPDEIRIEMARELKSSAADRKKTTHAINQGNDENQCIREILEKEFALSYISRNDIIKYKLYEELKPNGFKTLYSDTYIPKDKLFSKDFDIEHIIPKARLFDDSYSNKTLEARDINLAKSNKTAFDFVKEKYGEQGAEAYKKKLDMLLGNNVISKPKYNKLLMTEADIPSDFINRDLRNTQYIARKACEILGELVRTVTPTTGKITNRLREDWQLVDVMKELNFEKYEKLGLTEIVEDRDGRKIKRIKDWTKRNDHRHHAMDALAIAFTKPSYIQYLNNLNARSNKGDSIYAIENKELHYEEGKLRFNAPIPVNVFRAEAKRHLSAILVSIKAKNKVMTQNVNKIKTKHGIIKKIQLTPRGPLHNETIYGTKMRPIIKKVKVGAALDEATINKVSSPAIREVLLKRLNEYSGNAKKAFTGKNTLDKNPIYLNAERTKTVPASVKTVEWENYHPIRKPITPDLKVDKVIDKGIGEILKARLEEFNGDAKKAFSNLEENPIYLDQTKKIALKRVSIEGVLSTIPLHTLKNQAGKPIMGKDGKPVLGNYVQTSNNHHIAFYYDEDGNLQDNAVSFFEAAERKSQGISVIDKDYNRDKGWRFLFTMKQNEYFVFPNEATGFIPSEVDLTDEANYGIISPNLYRVQKMSRIEKGTSVSRDYWFRHHLETILNDDSRLKNSAFKRINSLKPLEGIIKVRINSIGKIVAVGEYD

SEQ ID NO: 1142 - protein, 1506 aa, Prevotella nigrescens
MKTILGLDLGPNSIGWAKVEVDDEGNYLRNIKLGSRIIPMTQDMLGDFDKGVKVSQTAIRTDFRGNRRLIERHLLRRERLHRVLHALKFLPKHYEDAIGWDRNEPATYGKFVNNSEPKLAWERQEDGSMRFLFMESFNEMVADFAQNQPSLVSDGKKIPLDWTIYYLRKKALTRPIKKEELAWILLNFNQKRGYYQLRGEEEEDNLTKRKEYYKLKVVGVEADGAPKGGKTWYNIHLENGWTARCQSKIPLDDWVGKVKEYIVTTEYEDDGKTPKCDKEGKVKRSFKSPEKDDWQLIKTRTEKFIDDSNKTVGAFIYDYLLEKPFDKIRGKYIRTIERKYYKNELREILREQTKYHEGLHSLEALKICAEELYKNNQQHQEYLLKKDMTFLLLNDLIFYQRPLKSKKSLIADCPYEVYKYDDKLTGKKGQKKIKCIAKSNPYYQEFRLWQFIANLRLFSVTDGKEVTAEYLKTEEDYVRLFSFLNDRKDIKQETFLRSFLKLKKESIGSEKIYPIRWNYIEDANKSYPCNATRHELLLAFDRADIPRELLDVEEREYRLWHLLYSIEAKEETESALRKLKANKAFGDLNIDDAFVNSFLKIKPFEKEYGAYSEKAIKKLLAVMRRGSLWKEADICEATKQNIAKILQNDIDEKLKKKIEAAVSSFNKLSDFQGLPTWLACYVVYGRHSEAAQIQCWQSPEDLKTYINKFKQHSLRNPIVEQCLLETLRTVYDIWKDAGQIDEIHIELGRNMKSTAEQRARKTKDILRNENTNLRIKNLLVELKNDDKIENVRPYSPSQQEILRIYEEGALQELSKEDEMFEDISKISKMAQPSPTELSRYKLWLEQKYRSPYTGRVIPLSKLFTTAYQIEHIIPQSRYFDDSFNNKVICESEVNSLKDNMLGYEFIKECGGRIVHCTLLGDVKIFTKEEYKDFVTKHYIDNTYKRDKLLLEDIPQEFSARQLNDSRYISKMVQTVLSNIVRAENEQEATSKFVVSCNGAITNRLKKDWGLNDVWSSIVCPRFKRLNEITKTNAFGHWEDKAGKHVFQTTVPLELQRGFSKKRIDHRHHAMDALVIACASRNIVNYLNNESANSPEKREDLRKKLCDEKRKIRKPWKTFTQDAREALSDVVVSFKNYVRVINKATNYYEHYSSSGNKVMISQKGNDMWAIRKPLHKESVFGRVNLCRKVIVSLKKALENIPAICDKTLRDYINALVEKHFNTRQLLAHFKSINYRLNRQCVEKVEVWQFSDEKIEMVARRKSLDTSFDDKQISSITDTGIQKILLNYLQTKDGNAEIAFTPEGIEEMNKNISLYNDGKAHQPILKVRVATPKGMKYPVGQTGNKATKFVVAEKGTNLYFAIYENELGVRSYDTIPLNIVVERLKEGLSPVPQANEADIPLKFYLSPNDLVYVPTKENEDELCRDRIYKFVDSSGTTANFVPHTSANTIYNVDKEYAEKCCNGAVFLNEYGLGSPQSKNQRALTGEMIKEICWKLKVDRLGNIIKVIK

SEQ ID NO: 1143 - protein, 774 aa, Prevotella oulorum
MEQCILETLRTVYDIWKEAGQIDEIHVELGREMKQTAEQRAHLTEKVLRNENTNLRIKSLLMELKNDADMKDVRPYSPMQQEILRIYEEGALQTLSKDDAAFTEIMKISKMAQPSASELQRYRLWLEQKYRSPYTGKPISLSKLFTSAYQIEHIIPKKRYFDDSFSNKVICEAEVNGKKDSMLAYEFIKDCGGDVIHCTTLGDVTILSEAEYKALVTELYANNKSKKDKLLMEDIPQDFINRQLNDSRYISRVVMTLLSNIVRIEGEEEATSKFVIPCSGGITDKLKKDWGLNDVWNNIVYPRFERLNALTNTSDFGQWENKEGKRVFQTSVPLELQRGYQKKRIDHRHHAMDALVIACASRKIINYLNNQEANDPTKQENARKQLCIKSRIIRKPWETFTQDAYKALDNIVVSFKNYVRVINKATNYYERYNADGKKAVDEQKGEAMWAIRKPMHKDTVFGHVNLRRKAVVKLKDALENIPAICDKTLRHYIQDLQKKHFNTKQLLAHFKSINYRLNKQAVDKVEVWQYSDDKEQLAATRKPLGPSFDAKCIAAITDTGIQKILLNYLQAKGGDPAIAFTPEGIAEMNQNIAVYNGGKQHQPILKVRIAKPMGKKFPIGQTGNKAFQYVIAEEGTNLYFAIYEDEEGNRTYDTIALREVVERLKQGLTPVPEKNEKGVALKFHLSPNDLVYVPTADELLSKVCSLDKNRIYKMVSATKSECLFIPHSVAKTIYDKVEFEALNKMGRALTGEMIKSVCWKIEVDRLGHIVNIIK

SEQ ID NO: 1144 - protein, 691 aa, Prevotella oulorum
MKTILGLDLGTNSIGWAKVIVDDNENYLRDIQLGSRIIPMSQDVLGKFDKGVTESQTAIRTSFRGVRRLRERTLQRRERLHRVLHTLHYLPPHYDSAIGWDRKTPTTYGKFLNHGEPKLAWERREDGTMQFLFMDAFHEMIADFAKYQPALVADGKKVPLDWTIYYLRKKALTQPIKKEELAWILLNFNQKRGYYQLRGEEDEENAAKHEEYHELKVVGVEVDEAGKGDNTWYNVKLENGWTYHRQSKIPLDDWVGKVRAFIVTTEYEKDGTTPKKDKEGNVKRSFRSPDEKDWGLRKKQTEHSLEASGTPVGAFIYDHLLKEPSDKIRGKFIHTIERKYYKQELAAILREQSKHHEKLCSKDMLKACIEELYPNNPLHRESLLKKDMPYLLIEDLIFYQRPLKSKKSLIAECPYEAYSYVDKETGEMKRQGIKCIAKSNPYYQEFRLWQLIANLRLRNRSDERDVTAEYLPHQEDYVRLFTYLNDRKEINQETLLKDFFKLKKVTIGGEKVFPIRWDYIEDKEKKYPCNATRHELLLALDRAGIEHDWLNDRDLAYRLWHLLYSVDSKDETERALRKLKDDDAFVESFLKIKPFEKEYGAYSEKAIKKLLPVMRRGSLWNEADLCPSTKERIANILQGTIDEKLKKKIGAFISSCQQVSDFQGLPEWLACYVVYGRHSEATDIQRWETPE

SEQ ID NO: 1145 - protein, 242 aa, Prevotella saccharolytica
MKLVLGLDLGVGSVGWALIFITDSGEPIKILALGERIVSMDSNNSNEFSAGATCTLNQKKTKAKSVRKGYSRYVQRRDALTAELRHIGMMPDETLIKLPVLDLWQLRANAATEGKKLSLAEIGRVLYHINQRRGYKHGKSDVSSDNKQKGYVKAVNERYCMIQERQQTIGQYFALKLKETAVTTEKGTFYTFRIKDQVFPREAYEEEFVVAYSTKVLKFKQITTLLNVVICLMMLLLIVQRY

SEQ ID NO: 1146 - protein, 1174 aa, Prevotella sp.
MEFHPELCDAELLKACAEELYRNNEAHRAQLLAKDFKHLLVEDVLFYQRPLKSKKSLIANCPYETRQYINKETGEIKDVNVKCIAKSNPYFQEFRLWQWISNLRLLRQADGQDVTAAYIKGNEDKERLFDLLNNQGEIKQEHILRDFLKLKKPKGGEFPLRWNYVDDKIYPANETRHAINKAIKGMAVDKEEKETLGQLLDQPAVAYMLWNLLYSITDRNELARALRRFALTHGVSSVDAFVESFLKVKPFKKEYGAYSEKATKKLLQVMRLGKYWCGDELPEPAKRTKGNKQAVYDEMAHRGICKQTLQNISNIIEENIDERLMGALLNPERPLTELSHFQGLSVSDACYVVYGRHSEVAEIVKWKDADELNTFINNFKQHSMRNPIVEQCVLETLRTVRDVWEQEGQIDEIHVELGRNMKRTAEQRARDTQAIQRNENTNMRISLLLTELKNDPSISDVRPYSPSQRELLKIYEEGALENLTNQDEDIAKISRLAQPSASELRRYKLWLDQKYVSPYTGRPIPLAKLFTPAYEIEHIIPQSRYFDNSFSNKVICEAEVNKLKDNLLGMEFIKKFGGKTKGILDEEAYKLHVTTNYAHNPAKRSKLLMEDLPTDFNSRQLNDTRYISKTVMALLSNVVREEGERETRSKHVVVCTGGVTDTLKKDWGLHDVWHNLVYPRFIRLNNLTGSQNFGYWRYLNEENSKKGEDSKKVFQITLPPECQRGFVKKRIDHRHHAMDALVIACASANIVNYLNNQSAANPHIHENLQRLLCDRKREIRKPWPTFTQDAQAALKDLVVSFKNTVRVVNKASNTYLRYDKDGKKKRFKQEGEGLKAIRKPMHKETYYGEVNLIRKEMVPLKRALDDVNAIVDKELRASIKGLLRDGFNPQQVLANFKAKDFKFDKRDIKKVEVYVSSEKSTPMVATRKSLDTSFNAKRIADITDTGIQKILLNYLKANDNSPEQAFTPEGIAYLNEHIAEYNDGKPHQPILKVRVSEVKGAKFAVGQTGSKKDKFVEAQSGTNLYFAIYEDKEGKRHFETIALKVAAERLKDKQMPVPEINDAGLPLKFYLSPNDLVYVPTDEDRATAHPSIDKMRIYKMVSATDRQCFFLPFTVASVISNKVEFEALNKMERVLDASEYSSAYDSSHVNKVMVKNVCWKLEVDRLGNITKIVR

SEQ ID NO: 1147 - protein, 992 aa, Prevotella sp.
MITRILGLDTGTNSLAWAVVDRDANGNYTLVKRGDVIFTEGVKIEKGIESSKAAERTAHKALRVHYSRRRLHKIDTLKVLVELNLCPCLSDEQLSQWKAKKTYPLTDDFMLWQRSGSAEENNPYYCRHRCLTQKLDLTDQSQRFLLGRAFYHLAQRRGFLSNRLDTSADSDESGKVKSGIAQLSVEMEKAGCEFLGEYFYQLYKQHGNTIKLRSRYTDREEHYKKEFLAICEKQELDPKWVEALQRAIYFQRPLKSQRKGVGKCTFEPKKPRCAESHPDYEAFRMLCFLNNVKIQTPNDTSLRPLNEDEREKIWPIFFRKSKPNFDFEDIAKALAGKNNYAWYKDAGEKPFKFNYRMQQGVSGCPVTAQLIDIFGSDWQTAIAETYTAVEKKNGTKTIDEMADDVWNVLYSFSSKDKLKAFATEKLQLDEASATKFANAKLPHGFASLSLKAIRNILPFLRQGFIYAHAVHLAKIPDIVTKAVWNDADKREMILSGLMEIIENYNPKDRGVEGTIDFCIKSHLQDVIDLRPGAADALYHPSMIETYPDAKLNKMGVFQLGSPRTNAIRNPMAMRSLHILRSVVNQLLRDGIIDRDTEVHVEYARELNDANKRKAIADYQREQEKKRKQYRDDIIALYKSECHKEIEPTDTDILKFQLWEEQNHLCLYTGTQIGICDFLGDNPKFDIEHTVPRSVGGDSTQMNLTLCDATFNRQVKGAQLPSQLSNHADILVRIDHWKSKCEDLRKQLDKIRTYGGMEKNMKDRLIQKRHRLKMDLDYWQGKYSRFTMTEVPEGFSRRQGAGIGLVSKYAGLFLKSLFHNEQNPNKSNVYVVKGVTTAEFRRMWGLQGEYEKKSRLNHCHHCIDAITIACIGKAEYDKMAQYYHDEELFQWRGTTTKPHFNKPWPTFTEDVLAIEQSLLVKHLTKDNMPKQAKKRVRTATGKYLAQGDTARGSLHKDTYYGAIEQNGEIRYVLRKPLNKFENEAELEKIVDQA

SEQ ID NO: 1148 - protein, 1375 aa, Prevotella sp.
MKKILGLDLGTTSIGWALVNESENKDEQSSIVRLGVRVIPLTVDEKGNFEKGKAITTNADRQQVHAARINLQRYKLRRENLRDCLQKQGWIGSEPMCEDGKSSTFETYKLRAKAAVEEVSLHEFARVLFMLNKKRGYKSNRKANDKEEGKLFDGMTIAKKLYEEHLTPAEYSLQLLNTGRKFTPEYYRSDLIEEFEKIWNEQQKYYPEILTDEFKQQLEGKAKSNTSKLFLGKYGIYSADTKGLDRRLQPLKWRVEAMKQQVDKDVLAFVISDLKGQIANTSGLLGAISDRSKELYFSKQTIGQYLWASLQENPHISIKNQPFYRQDYLDEFEKIWETQATYHKELTSELKQEIRDIIIFYQRPLKSKKNLIAVCELEQRKVKVTVDGKEKEITIGPKIAPKSSPMFQEFRIWQNLNNILLLDHETNSKRPLYEEERNLLYEELSVKEKLSKTEALKVLGKKSKQWDLNYKELEGNRTQAVLYDCYNRIIVMSGHEECNFKKLKASDIRHYVKMIFKNLAFNTDILCFDSSLKGHELERQPMCQLWHLLYSYEGDNSRTGNDALLRKLETSFGFPKEYAAVLADVIFEDSYGNLSVKAMRNILPHLQAGKDYSQACEEAGYKHSRRSLTKEELNQKVYKEKLELLPKNSLHNPVVEKILNQMVNVINAVIEEYGKPDEIRIELARDLKIGAAERENMTRSINQGNAENKRIREILEKEFALSYLSRNDIIKYKLYEELKSNGFKTLYSDTYISKDKLFSKDFDIEHIIPKARLFDDSLSNKTIEARDVNIAKSNKTAFDFILERYGEQGVKTYKTKLLRLLEDGAISNKKYNNLLKTEADIPSGFIDRDLRNTQYIAKKAYEILSELVKIVTPTTGSVTNRLREDWQLVDVMKELNFEKYQKLGLADVIEDRDGRKVKRIKDWTKRNDHRHHAMDALTIAFTKPSYIQYLNNLNARSDKSSSIYGIEVKELHREEGKFRFNAPLPINEFRAEAKRHLKSVLVSIKAKKKVMTQNVNKIKTKHGIIKKVQLTPRGELHNATYYGTKKRPLVRMVKVGAALDEATIKRVCSPAIRAALLKRLNAYNGDAKEAFTGRNSIDKNPIYLDIEQTKLVPVLVKTIEWGMYHPIRKRITPDLKIDKVIDKGIREKLKARLAEFNGDAQKAFSNLDENPIYMDEAKRITLKRVSIEGVLSAIPLHTLKDKAGKPVIGSDGKPVFGDYVQTSNNHHIAFYIDDKGNLQDNPVSFFEAAERKSQGVPVIDRRYNCDKGWHFVFTMKQNEYFVFPNEATGFIPSEVDLLDEANYCIISPNLYRVQKLSKASGRDYWFRHHLETMLNDDLRLKNSTFKRIQSLKGLEDIVKVRINSIGKIVAVGKYD

SEQ ID NO: 1149 - protein, 1483 aa, Prevotella sp.
MKTILGLDLGTNSIGWAKVSVDDYGNYLHDIKLGSRIIPMSQDVLGNFDSGVTVSQTAQRTEFRSKRRLVQRNLQRRERLHRVLHVLDFLPAHYDAAIGWDRTEAVTYGKFLNHAEPKLAWEELGNGKRRFLFMDSFHEMVADFARCQPALVADGKKIPLDWTIYYLRKKALTQAITKEELAWILLNFNQKRGYYQLRGEEEEENPTKQEEYYELKVVSVEATDSRKGNDTWYNVHLENGWIYRRSSKISLDDWVGKVKQFIVTTEYEKDGTTLKTDKEGNVKRSFRAPNENDWGLRKKRTETLLEMSGKTVGAFIYDHLLQEPADKIRGNFIRTIERHYYKAELEAILAEQCKYHIELRDKEMLEACARELYLNNLPHQRSLMKKDMTYLLLYDLIFYQRPLKSKKALIANCPYEYYEYVDKETGEIKRQNIKCIAKSNPYFQEFRLWQFVLNLRLFDRVEDKEVTANYLPTADDHARLFTYLNDRKEINQETLLKDYFKLKKVKIGNEKEYPIRWNYIEDKEKKYPCNETRYELLMALDRAGIEHKWLDDNNLEYRLWHLLYSVEVKSESETALRKLKNDDAFVNSFLKVKPFKKEYGAYSEKAIKRLLAVMRKGFLWNEQDICDETRKRIEIIIKGDVDEKVKERMGHAAYSFDRVSDFQGLPEWLACYVVYGRHSEAMDIQRWDSPERLMAYINNFKQYSLRNPIVEQCILETLRTVHDIWKETGQIDEIHVELGREMKSTSEERARRTQNVLRNENTNLRIKSLLIELKNDTDICNVHPYSPMQQEILRIYEEGALQELNREDEDFEEISKISQMSQPSGKELNRYKLWLEQKYRSPYTGKAISLAKLFTPAYQIEHVIPQSRYFDDSFTNKVICEAEVNTLKSNLLGYEFIKKHGGEIIHCTTLGDVRIFSESEYKAFVMDHYANNKSKKDKLLMEDIPQEFLSRQMNDSRYISKVVKTLLSNIVRMADESEATSKSVIVCTGGVTDRLKKDWGLNDVWNSIVYSRFERLNRLTGTEAFGHWENKDGKRVFQTSMPLELQRGFRKKRIDHRHHAMDALVIACASRNIVNYLNNESANNPKKREDLRRQLCDKNRVIRKPWETFTQDAYNALENVVVSFKNYVRVINKATNRYEHYDENGKKRFVQQKGSELWAIRKPMHKETYYGHVNLRRKELVTLQKALDDIPSICDKKLRDYISALVEKHFNKRQLLAHFKSTDYYWQKQYVNKVYVWTFSDDIKPLVATRKLLDTSFDAKRIGTITDTGIQKILRNYLEAKGGNATLAFTPEGIVEMNQNISKYNDGKPHQPILKVRITEPMGAKYRVGQTENKMAKYVEAQSGTNLYFAIYEDSEGKRSYTTVPLDEVAERLKQRLSPVPEKDENDVPLKFYLSPNDLVYVPTEEELQLRECKLNKDRIYKMVSSTGSECHFIPYYVANVIYNKVEFEAKNKIGRALTGEMIKAVCWKLEIDRLGNILKVIK

SEQ ID NO: 1150 - protein, 593 aa, Prevotella sp.
MNTRILGLDTGTNSLAWAVVDRDAKGNYTLVRRGDVIFTEGVNVDGQPVPSKAAVKSKYKSLRVQYARRRLRKIDTLKVLVSLDLCPYLSDQQLSQWKAKKTYPLTDDFMLWQRSGSAEENNPYYCRYRCLTQKLDLTDQSQRFLLGRAFYHLAQRRGFLSNRLDTTSDSAESGKVKSGIAQLSVEMEKAGCTFLGEYFYQLYKQHGNTVRLRSRYTDREEHYIKEFLAICEKQELDAQWVEKLQRALYFQRPLKSQRKGVGKCTFEPKKPRCAESHPDYEAFRMLCILNNIKIKTPKDVSLRPLNAEEREKVWPLFFRKSKPNFDFEDIAKALAGKNNYAWYKDAGEKPFRFNYRMHQGVSGCPVTAQLIDIFGSDWKAGIAETYTAVGKKNGTKTIDEMADDVWNVLYSFSSKDKLKAFATDKLQLDEARATKFANAKLPHGFAALSLKAIRNILPFLRQGFIYAHAVLLAKIPDIVTAAVWDDADKREQILSGLLEVIENYNPDDRGIEGTIDFCIKSHLQDVVDLRPGAADALYHPSMIEAYPDAKLNKMGVFQLGSPRTNAIRNPMAMRSLHILRSVVNLLLRDGMLS

SEQ ID NO: 1151 - protein, 1424 aa, Prevotella sp.
MTQKVLGLDLGTNSIGSAVRNLDLSDDLQWQLEFFSSDIFRSSVNKESNGREYSLAAQRSAHRRSRGLNEVRRRRLWATLNLLIKHGFCPMSSESLMRWCTYDKRKGLFREYPIDDKDFNAWILLDFNGDGRPDYSSPYQLRRELVTRQFDFEQPIERYKLGRALYHIAQHRGFKSSKGETLSQQETNSKPSSTDEIPDVAGAMKASEEKLSKGLSTYMKEHNLLTVGAAFAQLEDEGVRVRNNNDYRAIRSQFQHEIETIFKFQQGLSVESELYERLISEKKNVGTIFYKRPLRSQRGNVGKCTLERSKPRCAIGHPLFEKFRAWTLINNIKVRMSVDTLDEQLPMKLRLDLYNECFLAFVRTEFKFEDIRKYLEKRLGIHFSYNDKTINYKDSTSVAGCPITARFRKMLGEEWESFRVEGQKERQAHSKNNISFHRVSYSIEDIWHFCYDAEEPEAVLAFAQETLRLERKKAEELVRIWSAMPQGYAMLSQKAIRNINKILMLGLKYSDAVILAKVPELVDVSDEELLSIAKDYYLVEAQVNYDKRINSIVNGLIAKYKSVSEEYRFADHNYEYLLDESDEKDIIRQIENSLGARRWSLMDANEQTDILQKVRDRYQDFFRSHERKFVESPKLGESFENYLTKKFPMVEREQWKKLYHPSQITIYRPVSVGKDRSVLRLGNPDIGAIKNPTVLRVLNTLRRRVNQLLDDGVISPDETRVVVETARELNDANRKWALDTYNRIRHDENEKIKKILEEFYPKRDGISTDDIDKARYVIDQREVDYFTGSKTYNKDIKKYKFWLEQGGQCMYTGRTINLSNLFDPNAFDIEHTIPESLSFDSSDMNLTLCDAHYNRFIKKNHIPTDMPNYDKAITIDGKEYPAITSQLQRWVERVERLNRNVEYWKGQARRAQNKDRKDQCMREMHLWKMELEYWKKKLERFTVTEVTDGFKNSQLVDTRVITRHAVLYLKSIFPHVDVQRGDVTAKFRKILGIQSVDEKKDRSLHSHHAIDATTLTIIPVSAKRDRMLELFAKIEEINKMLSFSGSEDRTGLIQELEGLKNKLQMEVKVCRIGHNVSEIGTFINDNIIVNHHIKNQALTPVRRRLRKKGYIVGGVDNPRWQTGDALRGEIHKASYYGAITQFAKDDEGKVLMKEGRPQVNPTIKFVIRRELKYKKSAADSGFASWDDLGKAIVDKELFALMKGQFPAETSFKDACEQGIYMIKKGKNGMPDIKLHHIRHVRCEAPQSGLKIKEQTYKSEKEYKRYFYAAVGDLYAMCCYTNGKIREFRIYSLYDVSCHRKSDIEDIPEFITDKKGNRLMLDYKLRTGDMILLYKDNPAELYDLDNVNLSRRLYKINRFESQSNLVLMTHHLSTSKERGRSLGKTVDYQNLPESIRSSVKSLNFLIMGENRDFVIKNGKIIFNHR

SEQ ID NO: 1152 - protein, 241 aa, Prevotella sp.
QAVKEKIKEAIAGKNFKTAIAEPIFMNKEKGIRINKVRYYVKAQERLKIRQQRDLSSKEYKQFFCVENESNYLLAIYEGELKGKKERDFCVVNNLDSAACLKRSNKGKAAPLVPERSEERNLPLLAVLKRGTQVLFYENSPEEILFDNPQDLVRRLYKVTGINTKKDVKNGKTYLYGNIELRFHQNAQKKDDVKMQSGVYKNNEVLRQGIVLSHKQFKALVEGVDFEFNVLGEIKKKERHA

SEQ ID NO: 1153 - protein, 1216 aa, Prevotella stercorea
MTKILGIDTGTNSLGWAIVDKTADNYNLLDKGVNIFQEGVKIEKGIESSKAAERTEHRATRVRYYRIKLRKIRLLRILSDNHLCPPLSQEELSTWRLKKVYPKNELFMQWQRTDDDTEKTPYAYRHKCIHEKLDLSDVTDRYILGRAFYHIIQRRGFLSNRKEQGGEDSGKVKEGISTLTHEMNEAGYEYLGDYFYALYNKGEKIRKHYTARNEHFLSEFKAICEKQDLEKELGSEVVRNIEKAIFDQRPLKSQKGQVGKCVFEKNKTKCPSSHPMYEEFRMLTFINNIKIKTPNDDVLRPLNTGEREKIMPLFFRKSKKQFDFEDITKKLAPKKMYGFYKKEEDAEMPFLFNYPMDTSVSGCPVTAALKDVFGDDWITAICETYTLGEGKSRFDIVNDIWHALYFYSDKDKLAEFAINRLQLSEDEAKIFSEISLPADYASLSLKAICKILPYLRRGLIYSHAVFLGNLCEVMPKYEWSIKEMRETIIDNIIMEMDKCDTKDKRTFEVCIKDYLKGQYNVSDNSLKKLYHPSMIETYPRVQYTNEHGVYQLGSPRIDSVRNPMAMRSMFRLRKLVNRLLVEGKIDQNTEVHIEFARELNDANKRNAIALFVKENQSANDEARKQIITLFKKETGTDIEPTDKDILKYVLWEEQNHICLYTGKQIRISDFIGANPKFDIEHTIPRSVGGDSTKMNLTLCDSRFNREVKKTKLPVELPNHDEIMERIKEWKKNYELLDIQIRKNKKLSKGATTKEQKDTIIRKRHLLELRRDYWRGKYERFTMESVPEGFSRRQGTDISVISKYARLYLKSLFNRVYTVKGIATSDFRKIWGIQDIYSKKERINHVHHCIDAIVIACIGLDEYNKLGAYYHDEENNKWYGMSKASFKKPWATFVEDIKKIQDEILVYHYTPDNMPKQGRRRIKIDGKKILCKGDAARGSLHNDTYYGAIENDGAVKYVKRIDLASLEEKDVKNIVDDTVRSIIEAAIKEKGFKDAMASTIWMNEEKRVPIKKVRCFTPSITKPLNIRKQRDVSIKEYKQQYHVANDSNYLLALYIGTDNKGKEKREFEIVNILQAAQYYRTSNDKEVVDRHIVPIKSEHDYPFAYTLKIGTMVLLYEKSPNEVWDATIKERNRRLYKVTGLSTMRMKGRNGEYAYATVKLIHNEEARPSKDIKAKNGEYEQGEEFRPAIIMLHTQLNALVQGYDFEINELGEIRRLR

SEQ ID NO: 1154 - protein, 1487 aa, Prevotella timonensis; identical to SEQ ID NO: 130

SEQ ID NO: 1155 - protein, 770 aa, Pseudoramibacter alactolyticus
MAKGYFASDEEIDFSGVDDGFKNTLSSHQKFKEIFDVEVLNDWQKSMSEKIIFWATVYGDSKKFLKERLEDAYGNELDQKQIKRILGLRFKDWGRLSEAFLNLEGKNSKTNQSQTIIEALWNGDGTNNFNLMELLSSQFTYRDTLKKRALKGEKTLTNITYEDLSDLYLSPSVRRMVWQTILIVKELRQVLGAGPAKIFIEMARDVTLKAGTRTTSRRQQLLDLYKNVQTESRNWVEEIETQEESRFRSKKIFLYYTQMGQCMYTGEPIVFKDLFNRNLYDIDHIYPRHFVKDDSLINNLVLVKKQANSHKSDTFPIENSIQQARRDFWKWLSEKGLISREKFNRLTRRTSFSDEELAGFISRQIVETRQGTKAVAQIFENALPDSEVVYVKAGNVSDFRHHFNLLKCREINDLHHAQDAYLNVVVGNVYHTKFTKNPINFIKGYRKDRKAYAYHMDQIFDHPVKRNDIIAWQTDKNQSIATVKKVMAKGTPLVTRMSYEEHGELSNQNICSAKAAQKAEGKGYLPIKNSERLSNTQRYGGYNKYAGSYFFLVEHTLKKNRVRTIETMPLFLRDTIKTSKDLLKYCCESLKLEAPSIRVMKIKMGSLLSVNGAFVYLTGRSGKKLITPNGFQLILPQKWQDYIRLLIKTKDSPDDVEGISGGKNIEFYDILVEKHTKTCLKNRPNPIGEKLREWRNDFIALDNQKQSDILLEILKLTTFDNSGADLRAIGGKNQSGVSTIGKKISSQKSVVLVHRSVTGIFEKQVDLLSI

SEQ ID NO: 1156 - protein, 103 aa, Rhizobium etli
MSGEQLTREIGRSGVKASAVGLGTWAIGGWMWGGTDEAQSIAAIQASLDAGVTLIDTAPAYGLGRSEEIVGKALAGRRDKAVIATKCGLVWHTQKGNHFFDQD

SEQ ID NO: 1157 - protein, 1059 aa, Rhodovulum sp.
MGIRFAFDLGTNSIGWAVWRTGPGVFGEDTAASLDGSGVLIFKDGRNPKDGQSLATMRRVPRQSRKRRDRFVLRRRDLLAALRKAGLFPVDVEEGRRLAATDPYHLRAKALDESLTPHEMGRVIFHLNQRRGFRSNRKADRQDREKGKIAEGSKRLAETLAATNCRTLGEFLWSRHRGTPRTRSPTRIRMEGEGAKALYAFYPTREMVRAEFERLWTAQSRFAPDLLTPERHEEIAGILFRQRDLAPPKIGCCTFEPSERRLPRALPSVEARGIYERLAHLRITTGPVSDRGLTRPERDVLASALLAGKSLTFKAVRKTLKILPHALVNFEEAGEKGLDGALTAKLLSKPDHYGAAWHGLSFAEKDTFVGKLLDEADEERLIRRLVTENRLSEDAARRCASIPLADGYGRLGRTANTEILAALVEETDETGTVVTYAEAVRRAGERTGRNWHHSDERDGVILDRLPYYGEILQRHVVPGSGEPEEKNEAARWGRLANPTVHIGLNQLRKVVNRLIAAHGRPDQIVVELARELKLNREQKERLDRENRKNREENERRTAILAEHGQRDTAENKIRLRLFEEQARANAGIALCPYTGRAIGIAELFTSEVEIDHILPVSLTLDDSLANRVLCRREANREKRRQTPFQAFGATPAWNDIVARAAKLPPNKRWRFDPAALERFEREGGFLGRQLNETKYLSRLAKIYLGKICDPDRVYVTPGTLTGLLRARWGLNSILSDSNFKNRSDHRHHAVDAVVIGVLTRGMIQRIAHDAARAEDQDLDRVFRDVPVPFEDFRDHVRERVSTITVAVKPEHGKGGALHEDTSYGLVPDTDPNAALGNLVVRKPIRSLTAGEVDRVRDRALRARLGALAAPFRDESGRVRDAKGLAQALEAFGAENGIRRVRILKPDASVVTIADRRTGVPYRAVAPGENHHVDIVQMRDGSWRGFAASVFEVNRPGWRPEWEVKKLGGKLVMRLHKGDMVELSDKDGQRRVKVVQQIEISANRVRLSPHNDGGKLQDRHADADDPFRWDLATIPLLKDRGCVAVRVDPIGVVTLRRSNV

SEQ ID NO: 1158 - protein, 1405 aa, Riemerella anatipestifer
MKTILGLDLGTNSIGWALVKEAENSNEKSEIIKLGVRVNPLTVDEKTNFEAGRPLSTNADRTAKRSARRNLQRYKLRRKNLIDLLIKNQLIDKDTPLTEIGKNTTHQTLELRAKAARERIELEDLARVFLAINKKRGYRSSRKVNNEEEGQAVDGMAVAKKLYDENLTPGQYAYELLSKGKKYVPDFYRSDLQAEFNAIWEYQKQFYADILDDELYNALKGQGQQNSRKRFLAIKGVYTAENKGKRDDVKLRHYKWRSEAISKKINIEEVAYVLVEINNDLNKSSGYLGAISDRSKELYFNKETVGENLWKQIQKNPHTSLKNQVFYRQDYLDEFEQIWETQAQFHPQLTLALKEQIRDVIIFYQRKLKSQKGLLSFCQFESWEIERKDENGNVILNKTTQLPKRQTVGRRVAPKSSPLFQEFKIWQNINNLEVTKISEGASKNKKETETLSDDERKLLFEELNLRGNLSQKEVLQILGLKDKEYKTNFSEGLEGNRTNAALFNIYQQIAENEGYGFDWSKKSAQEIKEELKAVFPQIGIQADILDFNANLDGKEFENQASYQLWHLLYSAEEDDKINEEDQIIYGNSAVSLKKKLCEKFGFTPEYAKWIANVSLQDDYGNLSTKAMRKIIPYLIDGNDYSEACALAGYNHSNSLTKEENDNRELLDKLELLPKNSLRNPVVEKILNQMVNVVNQVIETYGKPDEVRIELARELKKSAEKRAEMTKSINEATRRNEDIKKLITKDFGIPNPTKSDVVRYRLWEELAPLAYKDVFTGKQIKKEDLFSSKIDIEHIIPKALLFDDSFSNKTLVFRETNLKKADRTAYDFIESDYNATLDDYIQRVETLYNNTKGTISKGKRNKLLMAQKNLPDGFIERDLRNSQYIAKKAKAMLYQVFKDVNVTSGSITDRLREDWDLINVMKELNFPKYKALGLTEIEERYDIGQEKTKRVEVITDWTKRNDHRHHAMNALTVAFTTSSHIQYLNYLNARKNESHKEHKNIKGIENKITHKQKDKRKFIPPMPNFREEAKKHIETILVSIKNKNKVYTKNINKTKKKSGHNTKEQLTPRGQLHKETVYGKSKRPMSKPTKINKNFSLEQAQLIINVQEKELVLRHLAQFDNNPAVAFDTKTLKKMPLLKNGEPLKEVLCFEEIFTIRKDITPDLKIEKVVDEKIKAILEQRKKDFGGNAKEAFSDLDKNPIWLNKKKGICIKRVTITGVSNAEALHHQKDHLGREILDDNGNPIPADFVSTGNNHHLAVYLDSEGKLQDNIVSFYEAVVRTSQGLPVVDKGLNKDLGWKFLFSLKQNEMFVFPNDDFDINDFDLLDDKKAELISKHLYRVQKISKVSAGNSFVRDIVFRHHLETTVKEVKELKDISYIQLKSLEGLRNIKKVRINHIGKIVQVGEY

SEQ ID NO: 1159 - protein, 1145 aa, Riemerella anatipestifer
MKTILGLDLGTNSIGWALVKETENSNEKSEIIKLGVRVNPLTVDEKTNFEAGRPLSTNADRTAKRSARRNLQRYKLRRKNLIDLLIKHRLIDKDTPLTEIGKNTTHQTLELRAKAARERIELEDLARVFLAINKKRGYRSSRKVNNEEEGQVVDGMAVAKKLYDENLTPGQYAYELLSKGKKYVPDFYRSDLQAEFDSIWEYQKQFYADILDDELYNALKGQGQQNSRKRFLAIKGVYTAENKGKRDEVKLQHYKWRSEAITQKLSIEEVAYVLVEINNDLNKSSGYLGAISDRSKELYFNKETVGENLWKQIQKNPHTSLKNQVFYRQDYLDEFEQIWETQAQFHPQLTLALKEQIRDVVIFYQRKLKSQKGLLSFCQFESWEIERKDENGNVILNKTTQLPKRQTVGRRVAPKSSPLFQEFKIWQNINNLEIAKISDGNSKNKKETEALSDDERKLLFEELNLRGNLSQKEVLQILGLKDKEYKTNFPEGLEGNRTNAALFNIYQQIAENEGYGDWTKKSAQEIKEELKAVFPQIGIQADILDFNAELDGKEFENQASYQLWHLLYSAEEDDKINEEDQIIYGNSAVSLKKKLCEKFGFTPEYAKWIANVSLQDDYGNLSTKAMRKIIPYLIDGNDYSEACALAGYNHSNSLTKEENDNRERLNKLELLPKNSLRNPVVEKILNQMVNVVNQVIETYGKPDEVRIELARELKKSAEERAEMTKGINEATRRNEDIKKLITKNFGIPNPTKNDVVRYRLWEELAPLAYKDVFTGRQIKKEDLFSSKIDIEHIIPKALLFDDSFSNKTLAFRETNLKKADRTAYGFIESDYNATLDDYIQRVETLYNNAKGTISKGKRNKLLMAQKNLPDGFIERDLRNSQYIAKKAKSMIEKVFNDVNVTSGSITDRLREDWDLINVMKELNFPKYKALGLTEIEERYDIGQEKTKKVEVITDWTKRNDHRHHAMDALTVAFTTKSHVQYLNNLNTIHSLKGDEVDLELSKLYGLKNTITEVVNKKRKFIPPMPNFREEAKKHIETILVSIKNKNKVYTKNINKTKKESGYHTKEQLTPRGQLHKETVYGKSKRPMNKPTKINKNFSLEQAQLIINVQEKELVLRHLAQFDNNPAVAFDTKTLKKCHYLKMVNL

SEQ ID NO: 1160 - protein, 1400 aa, Riemerella anatipestifer
MKTILGLDLGTNSIGWALVKETENSNEKSEIIKLGVRVNPLTVDEKTNFEAGRPLSTNADRTAKRSARRNLQRYKLRRKNLIDLLIKHRLIDKDTPLTEIGKNTTHQTLELRAKAARERIELEDLARVFLAINKKRGYRSSRKVNNEEEGQVVDGMAVAKKLYDENLTPGQYAYELLSKGKKYVPDFYRSDLQAEFDSIWEYQKQFYADILDDELYNALKGQGQQNSRKRFLAIKGVYTAENKGKRDEVKLQHYKWRSEAITQKLSIEEVAYVLVEINNDLNKSSGYLGAISDRSKELYFNKETVGENLWKQIQKNPHTSLKNQVFYRQDYLDEFEQIWETQAQFHPQLTLALKEQIRDVVIFYQRKLKSQKGLLSFCQFESWEIERKDENGNVILNKTTQLPKRQTVGRRVAPKSSPLFQEFKIWQNINNLEIAKISDGNSKNKKETEALSDDERKLLFEELNLRGNLSQKEVLQILGLKDKEYKTNFPEGLEGNRTNAALFNIYQQIAENEGYGDWTKKSAQEIKEELKAVFPQIGIQADILDFNAELDGKEFENQASYQLWHLLYSAEEDDKINEEDQIIYGNSAVSLKKKLCEKFGFTPEYAKWIANVSLQDDYGNLSTKAMRKIIPYLIDGNDYSEACALAGYNHSNSLTKEENDNRERLNKLELLPKNSLRNPVVEKILNQMVNVVNQVIETYGKPDEVRIELARELKKSAEERAEMTKGINEATRRNEDIKKLITKNFGIPNPTKNDVVRYRLWEELAPLAYKDVFTGRQIKKEDLFSSKIDIEHIIPKALLFDDSFSNKTLAFRETNLKKADRTAYGFIESDYNATLDDYIQRVETLYNNAKGTISKGKRNKLLMAQKNLPDGFIERDLRNSQYIAKKAKSMIEKVFNDVNVTSGSITDRLREDWDLINVMKELNFPKYKALGLTEIEERYDIGQEKTKKVEVITDWTKRNDHRHHAMDALTVAFTTKSHVQYLNNLNTIHSLKGDEVDLELSKLYGLKNTITEVVNKKRKFIPPMPNFREEAKKHIETILVSIKNKNKVYTKNINKTKKESGYHTKEQLTPRGQLHKETVYGKSKRPMNKPTKINKNFSLEQAQLIINVQEKELVLRHLAQFDNNPAVAFDTKTLKKMPLLKNGEPLKEVLCFEEIFTIRKDITPDLKIEKVVDEKIKAILEQRKKDFGGNAKEAFSDLDKNPIWLNKEKGICIKRVTITGVSNAEALHHQKDHLGREILDDNGNPIPADFVSTGNNHHVAIYEDEKGKLQEKVVSLYEAVARANQGLPVVDKGLNEDLGWKFLFTMKQNEMFVFPNDDFDVNDIDLLDENNAKIISQHLFRVQKLATKNYMFRHHLETNVQEVKELNDIAYKSIRSTEPLKNIKKVRINHIGKIVQVGEY

SEQ ID NO: 1161 - protein, 1128 aa, Roseburia intestinalis
MDEKMDYRIGLDIGIASVGWAVLQNNSDDEPVRIVDLGVRIFDTAEIPKTGESLAGPRRAARTTRRRLRRRKHRLDRIKWLFENQGLINIDDFLKRYNMAGLPDVYQLRYEALDRKLTDEELAQVLLHIAKHRGFRSTRKAETAAKENGAVLKATDENQKRMQEKGYRTVGEMIYLDEAFRIGCSWSEKGYILTPRNKAENYQHTMLRAMLVEEVKEIFSSQRRLGNKKATEELEEKYLEIMTSQRSFDLGPGMQPDGKPSPYAMEGFSDRVGKCTFLGDQGELRGAKGTYTAEYFVALQKINHTKLVNQDGETRNFTEEERRALTLLLFTQKEVKYAAVRKKLGLPEDILFYNLNYKKAATKEEQQKENQNTEKAKFIGMPYYHDYKKCLEERVKYLTENEVRDLFDEIGMILTCYKNDDSRTERLAKLGLVPIEMEGLLAYTPTKFQHLSMKAMRNIIPFLEKGMTYDKACEEAGYDFKADSKGTKQKLLTGENVNQTINEITNPVVKRSVSQTVKVINAIIRTYGSPQAINIELAREMSKTFEERRKIKGDMEKRQKNNEDVKKQIQELGKLSPTGQDILKYRLWQEQQGICMYSGKTIPLEELFKPGYDIDHILPYSITFDDSFRNKVLVTSQENRQKGNRTPYEYMGNDEQRWNEFETRVKTTIRDYKKQQKLLKKHFSEEERSEFKERNLTDTKYITTVIYNMIRQNLEMAPLNRPEKKKQVRAVNGAITAYLRKRWGLPQKNRETDTHHAMDAVVIACCTDGMIQKISRYTKVRERCYSKGTEFVDAETGEIFRPEDYSRAEWDEIFGVHIPKPWETFRAELDVRMGDDPKGFLDTHSDVALELDYPEYIYENLRPIFVSRMPNHKVTGAAHADTIRSPRHFKDEGIVLTKTALTDLKLDKDGEIDGYYNPQSDLLLYEALKKQLLLYGNDAKKAFAQDFHKPKADGTEGPVVRKVKIQKKQTMGVFVDSGNGIAENGGMVRIDVFRVNGKYYFVPVYTADVVKKVLPNRASTANKPYSEWRTMEDKDFLFSLYSRDLVHIKSKKGIPIKNVDGSLGESKEVYAYYIGADISGAKIEGKAHDSRYTFRGIGVQKLELIEKCQVDILGHISTVKNEKRMGFS

SEQ ID NO: 1162 - protein, 1471 aa, Scardovia wiggsiae
MGYKAPRNDKGEIDYGVGLDLGNGSVGWVAMDKDYHLIRARGHELIGARLFDPANSAENRRESRTTRRRLSRRRWRLRMLDSLFASELAKIDPNFLARRKYSWVHPKDEQNHENWYGSIIFGSKEQDKQFYKDYPTIYHLRKKLTEDTERHDIREIYVAIHHIVKYRGHFLREGEINSENLFDPEGFVELIKDVIKLNNSYDESTPIFEASPADVSEALLNEHTSRSGRIEDTLDKLDFSVSRVDKHELKGMRDAAKAVIGAIVGNTADFSKIFNLDNLDKDSKDNLKLKFADSNFDEKYGGVVGSGLLDETQIELVDRIHAVYDAVALKGILGDAHTISEAKVESYEKHRKNWKLIKEELRTKENKDEVDLWYGDLSGRQYKNPPDPEKGPDEGSKKDSPIRDSDQKQNLIKKANDYFTELIDDSQLSEEQKNCLKNDINNGQLFPVQRSSDNGVIPYQIHLNELRRIIENQKQYYPFLAETFIRKTAEGKSYEENKIVALLKFRVPYYVGPLVSKEDMEEHSSGNSAYHWMARNPGRGEAITPWNFDEVVDKDESGARFISRLTGTDTYLLGEPTLPQHSLLYEEYMVLSELNNVRLNVRQGNHWSDKNRQRLSYKQKEFLIENLFKEHKTVTRKRAEDCLSSMGCGEVQLFGLSDEKKFASSLSSYITLKKILGKAFVDDSGNSAILERIIEVQTVFEDREPLTHQLSLIDSLTVEQRKQLAKIHYTGWGKLSRKLLTSKKGSYKIHSQNEIMRTQHSIIDIMRGDSLNLIEIIRDKKIGIGEWIDNENLDRETGESDVSRLESVFEGIVMSPRVKRGVVQAVRVIDDLAKAIGNPPQRIFIEMADEVQASQRTVSRLSRLKALYGSPSLQKEFNDLKDLRKSLNETKDADLQEDRLYLYYIQLGKDLYTGKEISIDSLSSAYDIDHIVPQALTQDDSIDNRVLVSRKENARKTDSYLYTPDLIKNMRPLWGKLLAAGLMSQKKYDALTRVDDFKDREKQRFVQRSLVETRQIMKNVSTILRTYYGEDTNVVTLKSSITHDMRKYLGFPYKNRDINDYHHAQDALCISAAGQFMLNRHFVSGGEVTDGASNAYNMYLAEYLQEFRDAKARGERKRSTAFGFVVGSMSSKDDEKRTDHRTGEIVWSETNAEYLRKVMNYKKMLITQKVGDVKTRALYDETRYGHKESSAKSIKFDNLRRDTSLYGGFSGASTAYMMLVEYKKKNKLVSITAQEASLLAVADQKNDTVSVMDGILASHGLSGAKILLPKIVTGQLLDYSDALVTLQSASELNTARQMWLPRNDYNDIDIILKSKDIEDAAHKLGYDSDTVHVLRRIQKLFEAVFRVAESQFPLHQLSKDQQEEILRDPQNYGFGSAVKLLGGLLKALHANAENTNLAGLVKVLHGDKEYSDDGKAKEFKKFGFSPRWRRISNPTGFTLSDSDTFIYQSPSGIFEQRVTVKELKEKADKQK

SEQ ID NO: 1163 - protein, 116 aa, Sphingobacterium spiritivorum
MFRKYFEEKNSARLLFTLKQGDFVYVPDDNEEVILDESSPLFIDYWKNISERSNNIHVVQKFSGKEIYFLKHTIADTIAKKIEFGSQDCYQSLNGKSIKEFCIKIDSDRLGNISKV

SEQ ID NO: 1164 - protein, 1306 aa, Sphingobacterium spiritivorum; identical to SEQ ID NO: 93

SEQ ID NO: 1165 - protein, 1110 aa, Sphingobium sp.
MAEGKKRIWRLGADLGANSLGWAAIELSAPVNGKPIAILAAGSRIFSDGRDPKSGASLAVDRRDARAMRRRRDRFKQRQKALIKYLIADGLFPADEAARNAMAAIDPYAVRARALDEALSLPELGRALFHLNQRRGFKSNRKADRKADDDAGKIAIGIDRTRDAIAEDEADAGAEPGSWTFGKWLHERRLKGQSVRTRLRPESGEDAKGDGYDFYPDRALMEEEFDAIWAAQAPHHPDVLTNDVHDRLHEIIFYQRPLKAPQVGMCSLIPGDRRLPKAHPLFQRRRLLEELNALMIVRPGEVAQRLTREERDILLLKLKDKNKVSFATLRKALKLDPDARFNKESEDRTDLKGDEVAAVMGSKTRFGNLWVHLSIEAQWDVLARLDAVESDAEDAAFCAWLVETYALTPEQARAVANAPLPPGYGRFGETATRKLIEALRDGKKDDRVLVYSEAVTEAGLGHHSDRRTGEVFEDAKGRPQLPYYGVALERHIMPGTGDPSDPEEMRVGRLTNPTVHIGLNQLRRILNVLIRAYGPPAEIAIELARELKLTDEDKKRINRENNDNRIAAERRSEKLLAIGQADSGANRALLKLWEELNPANVLDRRCIYSGRQISIDMLFSAAVEVDHILPFAATLDDSNGNKIVCLREANREKRKRSPHDAWGHSARWDEIAARAAQLPRNKRWRFEPDAMDKFRDEGGFQARHLVDTQYLARLSREYLATLYPEKGEGSGHIWVSPGRLTEMVRRKLGLNDLLPDHNFGGGADQAKNRLDHRHHAIDAVVVAIVDRGMLNAIARASGQEGAEGRERIIIPEPWDGFRDALRETVNRITVSHRTDHGTASKAGLPKGKDATAGRLHNDTAYGFTGDTDAKGNSIVVRRVPLSSFKKLADLDRIRDADLKAALYQHLNGLEGKAFEKALAEFHKLEWHNFGGVRRVRVTEPLTVIPIKDRNGRIYKGYKGDSNYRYDVWELPDGKWVTNWKNEAGEAMSSVISMFDAHQSSEPPRPHPAARKILSLHQNDLLAIEREGEDRKLMRVVKFGQSGQITLAEHQQAGDLKKRDAVSNDDDPFKYFAPTSGGLKKVKARQVRIDEIGRVLDPGFPARTARRKTRG

SEQ ID NO: 1166 - protein, 1084 aa, Sporolactobacillus vineae
MKYSIGLDIGISSVGWSVINLDRERIELMGARLFDAAENPKNGSSLAAPRRDARSARRRLRRRRYRVGRVRHFIIDRGLVTRGQADQLFDWKDGDLDIWLVRVNALERLLTDREFARVLIHIAKNRGYRSNRKSEAKSGENGQVLSAIKANKELMEEKGYQTVAEMLVNEPETFAGRKRNRGGEYTHVIARSELEHEIRLIFTKQRAFGNRFATEENENTYVKIWAAQRPVATKDDILKKIGDCTFEKGEKRAPKASYAFQYFRALDKLNRLRILSVREPSRNLTDDERNLIVPALFNHDKQKYSDLRKILQLRDDQKFNELFYDPGKSLKENENKTFLSLAEQYKIRKVIRDVQGKDGLLQYRPLDIDTIAYALTVFKDDQDTRDYLSNTFVNGNGKQVLNLANRAFDAELIDGLLSLSFAKFGHLSLKALHKLIPHMEQGLSYYDACKKVGYHDNEQVGKSKQHLLPVIPADEIRNPVVVRSLSQTRKVINAIIKRYGSPTFMYIELAREMGRPYNERRDLEKQYNKNRTVNDSAIEQIHELYPEIGAPRGHDILKYKLWQQQDCKCAYSLEKIPAEKIFEPGYAEVDHIIPYSRSFDDSNSNKVLVLSRMNQEKKNRTPYEWFGGDEHRWNKFESYVNALKVNRKKKSLLTKKNMDTEEEDTFKSRHLNDTRYITRFIKSFVEDNLLFREIEGAKQHVFTVNGAYTSLMRKRWGFNKNREESDLHHSVDAVIIAVSQPFRNEVSRYFKHREISLPQLLKRTWDYFPEPWEGFVKELRARTLQDPEKLKLALESLDLDSYDPEFIDEVKPIFISRMPKRSIKGQIHDETLRRNRGKTKDGFVKIVTRTRLENIKFDKNGDFPMYGRESDPKTYQAIKQRYLENNKDKKKAFIEPLYKPAKNPNNASLIRSVKIEDKANQIVPLRDEAVAYNASIVRTEVYRNKETGKFYLAPVYVSDVFAGREPRRFIRANVPYEQWVNITDKFTFLFNLYPNDVIYIKMKKVKTTKSNINKTISWQESYFYFKGTDIHTGAITIIDHMNSFTDRVGTQGLQLFEKYQVDPLGNLSRVHGETQYGVPALSHS

SEQ ID NO: 1167 - protein, 475 aa, Staphylococcus massiliensis
MGQDYILGLDIGITSVGYGLIDYHDKSVIDAGVRLFKEANVENNEGRRSKRGSRRLQRRRKHRLARTRNLLESYQLNPFPKCEKNPYEIRVKGFKEVLTSDELSAALLHLAKRRGIDNVHVTDTESDSSDNGLSTKEQLAKNQKALESRYVCELQLERLLNDNKVRGANNRFKTQDFVREAKQILSIQKDHHNLDQVFIDKYISLLETRREYYEGPGKGSPYGWDGDIKKWYELLMGRCTYFPESLRSVKYAYSADLFNALNDLNNLVIVRDENDKLTYPEKYHIVENVFKQRKKPTLKQIAKEIDVAPEDIRGYRVTASGTPVFTSFKLYHDIKSVTSNDKVLEDTELLDAIAEVLTIYQSPIEVQEKLESLNVILTKEEIEGISKLTGYTGTHALSLKAIQIVIDELWETNDNQMTIFTRLNMKPQKVDLAKANKIPTSLVEDFIISPVAKRAFIQSIKVINAVIKNMVCLKI

SEQ ID NO: 1168 - protein, 581 aa, Staphylococcus massiliensis
MPKDIIIELAREKNSDEERKIIRDVQKRNQQTRDLVDKVIKETGKTKAKGMVEKLILHDKQEGKCLYSLKSIPLEDLLNNPHHYEVDHIIPRSVSYDNSMNNKVLVLQEENSKKSNQTPFQYFNSSNTHITFKQFKQHVLNLSKTKDRITKKKKEYLLEERDINKFSVQKEFINRNLVDTRYATRELMTLLRAYFSANELDVKVKAINGGFTSYLRKRWDFKKDRNAGYKHHAEDALIIANVDFIFKQLKALDNAKKVMEGRKVQVEKDNVEDNEHYESLFREPDQIKEIKLYDNYKFSHRVDKKPNRELINDTIYSTRKVDNKTYTIQTVNNIYDKQNDQLKKLFNKSPEKFLMYKHDPKTFDKLATIMRQYKNEKNPLYKFHDETGEYLTKYAKKDNGPIVKSLKYIGKQVNAHLDITNDYENSNNKVVKLSLKPFRFDVYLDDGKYKFVTVKYLDIIKKDTYYVIDEEKYKLALQQKKISENAKFIGSFYNNDLIKINGELLRVIGVNDDAKNTLELNMIDISYRDYVENMNLATTPRIRKNIGKSITILEKYTTDILGNTFKISSPEKPQFIFKVRD

SEQ ID NO: 1169 - protein, 1334 aa, Staphylococcus pseudintermedius; identical to SEQ ID NO: 200

SEQ ID NO: 1170 - protein, 1112 aa, Staphylococcus simulans; identical to SEQ ID NO: 247

SEQ ID NO: 1171 - protein, 773 aa, Streptococcus agalactiae
MNKPYSIGLDIGTNSVGWSIITDDYKVPAKKMRVLGNTDKEYIKKNLIGALLFDGGNTAADRRLKRTARRRYTRRRNRILYLQEIFAEEMSKVDDSFFHRLEDSFLVEEDKRGSKYPIFATLQEEKDYHEKFSTIYHLRKELADKKEKADLRLIYIALAHIIKFRGHFLIEDDSFDVRNTDISKQYQDFLEIFNTTFENNDLLSQNVDVEAILTDKISKSAKKDRILAQYPNQKSTGIFAEFLKLIVGNQADFKKYFNLEDKTPLQFAKDSYDEDLENLLGQIGDEFADLFSAAKKLYDSVLLSGILTVIDLSTKAPLSASMIQRYDEHREDLKQLKQFVKASLPEKYQEIFADSSKDGYAGYIEGKTNQEAFYKYLSKLLTKQEDSENFLEKIKNEDFLRKQRTFDNGSIPHQVHLTELKAIIRRQSEYYPFLKENQDRIEKILTFRIPYYIGPLAREKSDFAWMTRKTDDSIRPWNFEDLVDKEKSAEAFIHRMTNNDFYLPEEKVLPKHSLIYEKFTVYNELTKVRYKNEQGETYFFDSNIKQEIFDGVFKEHRKVSKKKLLDFLAKEYEEFRIVDVIGLDKENKAFNASLGTYHDLEKILDKDFLDNPDNESILEDIVQTLTLFEDREMIKKRLENYKDLFTESQLKKLYRRHYTGWGRLSAKLINGIRDKESQKTILDYLIDDGRSNRNFMQLINDDGLSFKSIISKAQAGSHSDNLKEVVGELAGSPAIKKGILQSLKIVDELVKVMGYEPEQIVVEMARENQTTNQ

SEQ ID NO: 1172 - protein, 1370 aa, Streptococcus agalactiae
MNKPYSIGLDIGTNSVGWSIITDDYKVPAKKMRVLGNTDKEYIKKNLIGALLFDGGNTAADRRLKRTARRRYTRRRNRILYLQEIFAEEMSKVDDSFFHRLEDSFLVEEDKRGSKYPIFATMQEEKDYHEKFPTIYHLRKELADKKEKADLRLVYLALAHIIKFRGHFLIEDDRFDVRNTDIQKQYQAFLEIFDTSFENNHLLSQNVDVEAILTDKISKSAKKDRILAQYPNQKSTGIFAEFLKLIVGNQADFKKHFNLEDKTPLQFAKDSYDEDLENLLGQIGDEFADLFSAAKKLYDSVLLSGILTVTDLSTKAPLSASMIQRYDEHREDLKQLKQFVKASLPEKYQEIFADSSKDGYAGYIEGKTNQEAFYKYLSKLLTKQEDSEYFLEKIKNEDFLRKQRTFDNGSIPHQVHLTELKAIIRRQSEYYPFLKENQDKIEKILTFRIPYYVGPLARGNSDFAWMTRKTDDSIRPWNFEDLVDKEKSAEAFIHRMTNNDLYLPEEKVLPKHSLIYEKFTVYNELTKVRYKNEQGETYFFDSNVKQEIFDGVFKEHRKVSKKQLLDFLAKEFEEFRIVDVTGLDKENKAFNASLGTYHDLKKILDKDFLDNPDNESILEDIVQTITLFEDREMIKKRLENYKDLFTESQLKKLYRRHYTGWGRLSAKLINGIRDRESQKTILDYLISDGRANRNFMQLINDDGLSFKSIISKAQSGSHSDNLKEVVGELAGSPAIKKGILQSLKIVDELVKVMGYEPEQIVVEMARENQTTNQGRRNSRQRYKLLEDGVKNLASDLNGDILKEYPTDNQALQNERLFLYYLQNGRDMYTGEALDIDNLSQYDIDHIVPQAFIKDDSIDNRVLVSSAKNRGKSDDVPSIDIVKARKAFWKKLLDAKLISQRKYDNLTKAERGGLTPDDKAGFIQRQLVETRQITKHVARILDERFNNKVDDNNKPIRKVKIVTLKSNLVSNFRKEFGFYKIREVNNYHHAHDAYLNAVVAKAILTKYPQLEPEFVYGDYPKYNSYKTRKSATEKLFFYSNIMNFFKTKVTLADETVVVKDDIEVNNETGEIAWDKKKHFATVRKVLSYPQVNIVKKTEVQTGGFSKESILAHSNSDKLIPRKTKDIYLDPKKYGGFDSPIVAYSVLVLADIKKGKAQKLKTVKELIGITIMERERFEKNPSAFLESKGYLNIRTDKLIILPKYSLFELENGRRRLLASAGELQKGNELALPTQYMKFLYLASRYNESKGKPEEIEKKQEFVNQHVSYFDDILQLINDFSKRVILADANLEKINKLYSDNKDNTPVDELAKNIINLFTFTSLGAPAAFKFFDKSVDRKRYTSTKEVLDSTLIHQSITGLYETRIDLGKLGED

SEQ ID NO: 1173 - protein, 1370 aa, Streptococcus agalactiae
MNKPYSIGLDIGTNSVGWSIITDDYKVPAKKMRVLGNTDKEYIKKNLIGALLFDGGNTAADRRLKRTARRRYTRRRNRILYLQEIFAEEMSKVDDSFFHRLEDSFLVEEDKRGSKYPIFATMQEEKDYHEKFPTIYHLRKELADKKEKADLRLVYLALAHIIKFRGHFLIEDDRFDVRNTDIQKQYQAFLEIFDTSFENNHLLSQNVDVEAILTDKISKSAKKDRILAQYPNQKSTGIFAEFLKLIVGNQADFKKHFNLEDKTPLQFAKDSYDEDLENLLGQIGDEFADLFSAAKKLYDSVLLSGILTVTDLSTKAPLSAYMIQRYDEHREDLKQLKQFVKASLPEKYQEIFADSSKDGYAGYIEGKTNQEAFYKYLSKLLTKQEDSEYFLEKIKNEDFLRKQRTFDNGSIPHQVHLTELKAIIRRQSEYYPFLKENQDKIEKILTFRIPYYVGPLARGNSDFAWMTRKTDDSIRPWNFEDLVDKEKSAEAFIHRMTNNDLYLPEEKVLPKHSLIYEKFTVYNELTKVRYKNEQGETYFFDSNVKQEIFDGVFKEHRKVSKKQLLDFLAKEFEEFRIVDVTGLDKENKAFNASLGTYHDLKKILDKDFLDNPDNESILEDIVQTITLFEDREMIKKRLENYKDLFTESQLKKLYRRHYTGWGRLSAKLINGIRDRESQKTILDYLISDGRANRNFMQLINDDGLSFKSIISKAQSGSHSDNLKEVVGELAGSPAIKKGILQSLKIVDELVKVMGYEPEQIVVEMARENQTTNQGRRNSRQRYKLLEDGVKNLASDLNGDILKEYPTDNQALQNERLFLYYLQNGRDMYTGEALDIDNLSQYDIDHIVPQAFIKDDSIDNRVLVSSAKNRGKSDDVPSIDIVKARKAFWKKLLDAKLISQRKYDNLTKAERGGLTPDDKAGFIQRQLVETRQITKHVARILDERFNNKVDDNNKPIRKVKIVTLKSNLVSNFRKEFGFYKIREVNNYHHAHDAYLNAVVAKAILTKYPQLEPEFVYGDYPKYNSYKTRKSATEKLFFYSNIMNFFKTKVTLADETVVVKDDIEVNNETGEIAWDKKKHFATVRKVLSYPQVNIVKKTEVQTGGFSKESILAHSNSDKLIPRKTKDIYLDPKKYGGFDSPIVAYSVLVLADIKKGKAQKLKTVKELIGITIMERERFEKNPSAFLESKGYLNIRTDKLIILPKYSLFELENGRRRLLASAGELQKGNELALPTQYMKFLYLASRYNESKGKPEEIEKKQEFVNQHISYFDDILQLINDFSKRVILADANLEKINKLYSDNKDNTPVDELAKNIINLFTFTSLGAPAAFKFFDKSVDRKRYTSTKEVLDSTLIHQSITGLYETRIDLGKLGED

SEQ ID NO: 1174 - protein, 1378 aa, Streptococcus agalactiae
MNKPYSIGLDIGTNSVGWSIITDDYKVPAKKMRVLGNTDKEYIKKNLIGALLFDGGNTAADRRLKRTARRRYTRRRNRILYLQEIFAEEMSKVDDSFFHRLEDSFLVEEDKRGSKYPIFATMQEEKYYHEKFPTIYHLRKELADKKEKADLRLIYLALAHIIKFRGHFLIEDDRFDVRNTDIQKQYQAFLEIFDTTFENNDLLSQNVDVEAILTDKISKSAKKDRILARYPNQKSTGIFAEFLKLIVGNQADFKKHFNLEDKTPLQFAKDSYDEDLENLLGQIGDEFADLFSAAKKLYDSVLLSGILTVIDLSTKAPLSASMIQRYDEHHEDLKHLKQFVKASLPENYREVFADSSKDGYAGYIEGKTSQEAFYKYLLKLLTKQEGSEYLLEKIKNEDFLRKQRTFDNGSIPHQVHLTELRAIIRRQSEYYPFLKENLDRIEKILTFRIPYYVGPLAREKSDFAWMTRKTDDSIRPWNFEDLVDKEKSAEAFIHRMTNNDLYLPEEKVLPKHSLIYEKFTVYNELTKVRFLAEGFKDFQFLNRKQKETIFNSLFKEKRKVTEKDIISFLNKVDGYEGIAIKGIEKQFNASLSTYHDLKKILGKDFLDNTDNELILEDIIQTLTLFEDREMIKKRLDIYKDFFTESQLKKLYRRHYTGWGRLSAKLINGIRNKENQKTILDYLIDDGSANRNFMQLIKDAGLSFKPIIDKARTGSHSDNLKEVVGELAGSPAIKKGILQSLKIVDELVKVMGYEPEQIVVEMARENQTTAKGLSRSRQRLTTLRESLGNLKSNILEEKKPKYVKDQVENHHLSDDRLFLYYLQNGKDMYTDDELDIDNLSQYDIDHIIPQAFIKDDSIDNRVLVSSAKNRGKSDDVPSIEIVKARKMFWKNLLDAKLMSQRKYDNLTKAERGGLTSDDKARFIQRQLVETRQITKHVARILDERFNNELDSKGRRIRKVKIVTLKSNLVSNFRKEFGFYKIREVNNYHHAHDAYLNAVVAKAILTKYPQLEPEFVYGLYRRKKLSKIVREDKEEKYSEATRKMFFYSNLMNMFKRVVRLADGSIVVRPVIETGRYMGKTAWDKKKHFATVRKVLSYPQNNIVKKTEIQTGGFSKESILAHGNSDKLIPRKTKDIYLDPKKYGGFDSPIVAYSVLVVADIKKGKAQKLKTVTELLGITIMERSRFEKNTSAFLESKGYLNIRDDKLMILPKYSLFELENGRRRLLASAGELQKGNELALPTQFMKFLYLASRYNESKGKPEEIEKKQEFVNQHVSYFDDILQLINDFSNRVILADANLEKINKLYQDNKENIPVDELANNIINLFTFTSLGAPAAFKFFDKIVDRKRYTSTKEVLNSTLIHQSITGLYETRIDLGKLGEG

SEQ ID NO: 1175 - protein, 1370 aa, Streptococcus agalactiae
MNKPYSIGLDIGTNSVGWSIITDDYKVPAKKMRVLGNTDKEYIKKNLIGALLFDGGNTAADRRLKRTARRRYTRRRNRILYLQEIFAEEMSKVDDSFFHRLEDSFLVEEDKRGSKYPIFATMQEEKYYHEKFPTIYHLRKELADKKEKADLRLIYLALAHIIKFRGHFLIEDDRFDVRNTDIQKQYQAFLEIFDTTFENNDLLSQNVDVEAILTDKISKSAKKDRILARYPNQKSTGIFAEFLKLIVGNQADFKKHFNLEDKTPLQFAKDSYDEDLENLLGQIGDEFADLFSAAKKLYDSVLLSGILTVTDLSTKAPLSASMIQRYDEHREDLKQLKQFVKASLPEKYQEIFADSSKDGYAGYIEGKTNQEAFYKYLSKLLTKQEGSEYLLEKIKNEDFLRKQRTFDNGSIPHQVHLTELRAIIRRQSEYYPFLKENLDRIEKILTFRIPYYVGPLAREKSDFAWMTRKTDDSIRPWNFEDLVDKEKSAEAFIHRMTNNDLYLPEEKVLPKHSLIYEKFTVYNELTKVRFLAEGFKDFQFLNRKQKETIFNSLFKEKRKVTEKDIISFLNKVDGYEGIAIKGIEKQFNASLSTYHDLKKILGKDFLDNTDNELILEDIVQTLTLFEDREMIRKRLDIYKDFFTESQLKKLYRRHYTGWGRLSAKLINGIRNKENQKTILDYLIDDGSANRNFMQLIKDAGLSFKPIIDKARTGSHSDNLKEVVGELAGSPAIKKGILQSLKIVDELVKVMGYEPEQIVVEMARENQTTAKGLSRLRQRLTTLRESLANLKSNILEEKKPKYVKDQVENHHLSDDRLFLYYLQNGKDMYTDDELDIDNLSQYDIDHIIPQAFIKDDSIDNRVLVSSAKNRGKSDDVPSVEIVKDCKVFWKKLLDAKLMSQRKYDNLTKAERGGLTSDDKARFIQRQLVETRQITKHVARILDERFNNELDSKGRRIRKVKIVTLKSNLVSNFRKEFGFYKIREVNNYHHAHDAYLNAVVAKAILTKYPQLEPEFVYGDYPKYNSYKTRKSATEKLFFYSNIMNFFKTKVTLADGTVVVKDDIEVNNDTGEIVWDKKKHFATVRKVLSYPQVNIVKKTEIQTGGFSKESILAHGNSDKLIPRKTKDIYLDPKKYGGFDSPIVAYSVLVVADIKKGKAQKLKTVTELLGITIMERSRFEKNPSAFLESKGYLNIRDDKLMILPKYSLFELENGRRRLLASADELQKGNELALPTQFMKFLYLASRYNELKGKPEEIEQKQEFVVQHVSYFDDILQIINDFSNRVILADANLEKINKLYQDNKENIPVDELANNIINLFTFTSLGAPAAFKFFDKIVDRKRYTSTKEVLNSTLIHQSITGLYETRIDLGKLGED

SEQ ID NO: 1176 - protein, 1377 aa, Streptococcus agalactiae
MNKPYSIGLDIGTNSVGWSIITDDYKVPAKKMRVLGNTDKEYIKKNLIGALLFDGGNTAADRRLKRTARRRYTRRRNRILYLQEIFAEEMSKVDDSFFHRLEDSFLVEEDKRGSKYPIFATMQEEKYYHEKFPTIYHLRKELADKKEKADLRLVYLALAHIIKFRGHFLIEDDRFDVRNTDIQKQYQAFLEIFDTTFENNHLLSQNVDVEAILTDKISKSAKKDRILAQYPNQKSTGIFAEFLKLIVGNQADFKKHFNLEDKTPLQFAKDSYDEDLENLLGQIGDEFADLFSVAKKLYDSVLLSGILTVTDLSTKAPLSASMIQRYDEHHEDLKHLKQFVKASLPENYREVFADSSKDGYAGYIEGKTNQEAFYKYLLKLLTKQEGSEYFLEKIKNEDFLRKQRTFDNGSIPHQVHLTELRAIIRRQSEYYPFLKENQDRIEKILTFRIPYYVGPLAREKSDFAWMTRKTDDSIRPWNFEDLVDKEKSAEAFIHRMTNNDLYLPEEKVLPKHSLIYEKFTVYNELTKVRFLAEGFKDFQFLNRKQKETIFNSLFKEKRKVTEKDIISFLNKVDGYEGIAIKGIEKQFNASLSTYHDLKKILGKDFLDNTDNELILEDIVQTLTLFEDREMIKKCLDIYKDFFTESQLKKLYRRHYTGWGRLSAKLINGIRNKENQKTILDYLIDDGSANRNFMQLINDDDLSFKPIIDKARTGSHSDNLKEVVGELAGSPAIKKGILQSLKIVDELVKVMGYEPEQIVVEMARENQTTAKGLSRSRQRLTTLRESLANLKSNILEEKKPKYVKDQVENHHLSDDRLFLYYLQNGRDMYTKKALDIDNLSQYDIDHIIPQAFIKDDSIDNRVLVSSAKNRGKSDDVPSIEIVKARKMFWKNLLDAKLMSQRKYDNLTKAERGGLTSDDKARFIQRQLVETRQITKHVARILDERFNNEVDNGKKICKVKIVTLKSNLVSNFRKEFGFYKIREVNDYHHAHDAYLNAVVAKAILTKYPQLEPEFVYGMYRQKKLSKIVHEDKEEKYSEATRKMFFYSNLMNMFKRVVRLADGSIVVRPVIETGRYMGKTAWDKKKHFATVRKVLSYPQNNIVKKTEIQTGGFSKESILAHGNSDKLIPRKTKDIYLDPKKYGGFDSPIVAYSVLVVADIKKGKAQKLKTVTELLGITIMERSRFEKNPSAFLESKGYLNIRDDKLMILPKYSLFELENGRRRLLASAGELQKGNELALPTQFMKFLYLASRYNESKGKPEEIEKKQEFVNQHVSYFDDILQLINDFSKRVILADANLEKINKLYQDNKENIPVDELANNIINLFTFTSLGAPAAFKFFDKIVDRKRYTSTKEVLNSTLIHQSITGLYETRIDLGKLGED

SEQ ID NO: 1177 - protein, 1370 aa, Streptococcus agalactiae
  misc_feature (117)..(117): Xaa can be any naturally occurring amino acid
MNKPYSIGLDIGTNSVGWSIITDDYKVPAKKMRVLGNTDKEYIKKNLIGALLFDGGNTAADRRLKRTARRRYTRRRNRILYLQEIFAEEMSKVDDSFFHRLEDSFLVEEDKRGSKYXIFATLQEEKDYHEKFSTIYHLRKELADKKEKADLRLIYIALAHIIKFRGHFLIEDDSFDVRNTDISKQYQDFLEIFNTTFENNDLLSQNVDVEAILTDKISKSAKKDRILAQYPNQKSTGIFAEFLKLIVGNQADFKKYFNLEDKTPLQFAKDSYDEDLENLLGQIGDEFADLFSAAKKLYDSVLLSGILTVIDLSTKAPLSASMIQRYDEHREDLKQLKQFVKASLPEKYQEIFADSSKDGYAGYIEGKTNQEAFYKYLSKLLTKQEDSENFLEKIKNEDFLRKQRTFDNGSIPHQVHLTELKAIIRRQSEYYPFLKENQDRIEKILTFRIPYYIGPLAREKSDFAWMTRKTDDSIRPWNFEDLVDKEKSAEAFIHRMTNNDFYLPEEKVLPKHSLIYEKFTVYNELTKVRYKNEQGETYFFDSNIKQEIFDGVFKEHRKVSKKKLLDFLAKEYEEFRIVDVIGLDKENKAFNASLGTYHDLEKILDKDFLDNPDNESILEDIVQTLTLFEDREMIKKRLENYKDLFTESQLKKLYRRHYTGWGRLSAKLINGIRDKESQKTILDYLIDDGRSNRNFMQLINDDGLSFKSIISKAQAGSHSDNLKEVVGELAGSPAIKKGILQSLKIVDELVKVMGYEPEQIVVEMARENQTTNQGRRNSRQRYKLLDDGVKNLASDLNGNILKEYPTDNQALQNERLFLYYLQNGRDMYTGEALDIDNLSQYDIDHIIPQAFIKDDSIDNRVLVSSAKNRGKSDDVPSLEIVKDCKVFWKKLLDAKLMSQRKYDNLTKAERGGLTSDDKARFIQRQLVETRQITKHVARILDERFNNELDSKGRRIRKVKIVTLKSNLVSNFRKEFGFYKIREVNNYHHAHDAYLNAVVAKAILTKYPQLEPEFVYGDYPKYNSYKTRKSATEKLFFYSNIMNFFKTKVTLADGTVVVKDDIEVNNDTGEIVWDKKKHFATVRKVLSYPQNNIVKKTEIQTGGFSKESILAHGNSDKLIPRKTKDIYLDPKKYGGFDSPIVAYSVLVVADIKKGKAQKLKTVTELLGITIMERSRFEKNPSAFLESKGYLNIRADKLIILPKYSLFELENGRRRLLASAGELQKGNELALPTQFMKFLYLASRYNESKGKPEEIEKKQEFVNQHVSYFDDILQLINDFSKRVILADANLEKINKLYQDNKENISVDELANNIINLFTFTSLGAPAAFKFFDKIVDRKRYTSTKEVLNSTLIHQSITGLYETRIDLGKLGED

SEQ ID NO: 1178 - protein, 1370 aa, Streptococcus agalactiae
MNKPYSIGLDIGTNSVGYSVVTDDYKVPAKKMRVLGNTDKEYIKKNLIGALLFDGGNTASDRRLKRTARRRYTRRRNRILYLQEIFAEEMSKVDDSFFHRLEDSFLVEDDKRGSKYPIFATMQEEKDYHEKFPTIYHLRKELADKKEKADLRLVYLALAHIIKFRGHFLIEDDSFDVRNTDIQRQYQAFLEIFDTTFENNHLLSQNIDVEGILTDKISKSAKKDRILAQYPNQKSTGIFAEFLKLIVGNQADFKKHFNLEDKTPLQFAKDSYDEDLENLLGQIGDEFADLFSVAKKLYDSVLLSGILTVTDLSTKAPLSASMIQRYDEHREDLKQLKQFVKASLPEKYQEIFTDSSKDGYAGYIEGKTNQGAFYKYLSKLLTKQEGSEYFLEKIKNEDFLRKQRTFDNGSIPHQVHLTELKAIIRRQSEYYPFLKENLDRIEKILTFRIPYYVGPLAREKSDFAWMTRKTDDSIRPWNFEELVDKEASAEAFIHRMTNNDLYLPEEKVLPKHSLIYEKFTVYNELTKVRYKNEQGETYFFDSNIKQEIFDGVFKEHRKVSKKKLLDFLAKEYEEFRIVDVIGLDKENKAFNASLGTYHDLKKILDKDFLDNPDNESILEDIVQTLTLFEDREMIKKRLENYKDLFTESQLKKLYRRHYTGWGRLSAKLINGIRDKESQKTILDYLISDGRANRNFMQLIHDDGLSFKPIIDKAQAGSHSDNLKEVVGELAGSPAIKKGILQSLKIVDELVKVMGYEPEQVVVEMARENQTTNQGRRNTRQRYKLLEEGVKNLASDLNGNILKEYPTDNQALQNERLFLYYLQNGRDMYTGEALDIDNLSQYDIDHIVPQAFIKDDSIDNRVLVSSAKNRGKSDNVPSIDIVKARKAFWKKLLDAKLMSQRKYDNLTKAERGGLTSDDKARFIQRQLVETRQITKHVARILDERFNNELDSKGRRIRKVKIVTLKSNLVSNFRKEFGFYKIREVNDYHHAHDAYLNAVVAKAILTKYPQLEPEFVYGDYPKYNSYKTRKSATEKLFFYSNIMNFFKTKVTLADGTVVVKDDIEVNNDTGEIVWDKKKHFATVRKVLSYPQVNIVKKTEIQTGGFSKESILAHGNSDKLIPRKTKDIYLDPKKYGGFDSPIVAYSVLVVADIKKGKAQKLKTVTELLGITIMERFRFEKNPSAFLESKGYLNIRDDKLMILPKYSLFELENGRRRLLASAGELQKGNELALPTQYMKFLYLASRYNELKGKPEEIEQKQEFVVQHVSYFDDILQIINDFSNRVILADANLEKINKLYQDNKENISVDELANNIINLFTFTSLGAPAAFKFFDKIVDRKRYTSTKEVLNSTLIHQSITGLYETRIDLGKLGED

SEQ ID NO: 1179 - protein, 1370 aa, Streptococcus agalactiae
MNKPYSIGLDIGTNSVGYSVVTDDYKVPAKKMRVLGNTDKEYIKKNLIGALLFDGGNTASDRRLKRTARRRYTRRRNRILYLQEIFAEEMSKVDDSFFHRLEDSFLVEDDKRGSKYPIFATMQEEKDYHEKFPTIYHLRKELADKKEKANLRLVYLALAHIIKFRGHFLIEDDSFDVRNTDIQRQYQAFLEIFDTTFENNHLLSQNIDVEGILTDKISKSAKKDRILAQYPNQKSTGIFAEFLKLIVGNQADFKKHFNLEDKTPLQFAKDSYDEDLENLLGQIGDEFADLFSVAKKLYDSVLLSGILTVTDLSTKAPLSASMIQRYDEHREDLKQLKQFVKASLPEKYQEIFTDSSKDGYAGYIEGKTNQGAFYKYLSKLLTKQEGSEYFLEKIKNEDFLRKQRTFDNGSIPHQVHLTELKAIIRRQSEYYPFLKENLDRIEKILTFRIPYYVGPLAREKSDFAWMTRKTDDSIRPWNFEELVDKEASAEAFIHRMTNNDLYLPEEKVLPKHSLIYEKFTVYNELTKVRYKNEQGETYFFDSNIKQEIFDGVFKEHRKVSKKKLLDFLAKEYEEFRIVDVIGLDKENKAFNASLGTYHDLKKILDKDFLDNPDNESILEDIVQTLTLFEDREMIKKRLENYKDLFTESQLKKLYRRHYTGWGRLSAKLINGIRDKESQKTILDYLISDGRANRNFMQLIHDDGLSFKPIIDKAQAGSHSDNLKEVVGELAGSPAIKKGILQSLKIVDELVKVMGYEPEQVVVEMARENQTTNQGRRNTRQRYKLLEEGVKNLASDLNGNILKEYPTDNQALQNERLFLYYLQNGRDMYTGEALDIDNLSQYDIDHIVPQAFIKDDSIDNRVLVSSAKNRGKSDNVPSIDIVKARKAFWKKLLDAKLMSQRKYDNLTKAERGGLTSDDKARFIQRQLVETRQITKHVARILDERFNNELDSKGRRIRKVKIVTLKSNLVSNFRKEFGFYKIREVNDYHHAHDAYLNAVVAKAILTKYPQLEPEFVYGDYPKYNSYKTRKSATEKLFFYSNIMNFFKTKVTLADGTVVVKDDIEVNNDTGEIVWDKKKHFATVRKVLSYPQVNIVKKTEIQTGGFSKESILAHGNSDKLIPRKTKDIYLDPKKYGGFDSPIVAYSVLVVADIKKGKAQKLKTVTELLGITIMERFRFEKNPSAFLESKGYLNIRDDKLMILPKYSLFELENGRRRLLASAGELQKGNELALPTQYMKFLYLASRYNELKGKPEEIEQKQEFVVQHVSYFDDILQIINDFSNRVILADANLEKINKLYQDNKENISVDELANNIINLFTFTSLGAPAAFKFFDKIVDRKRYTSTKEVLNSTLIHQSITGLYETRIDLGKLGED

SEQ ID NO: 1180 - protein, 1370 aa, Streptococcus agalactiae
  misc_feature (9)..(9): Xaa can be any naturally occurring amino acid
MNKPYSIGXDIGTNSVGWSIITDDYKVPAKKMRVLGNTDKEYIKKNLIGALLFDGGNTAADRRLKRTARRRYTRRRNRILYLQEIFAEEMSKVDDSFFHRLEDSFLVEEDKRGSKYPIFATLQEEKDYHEKFSTIYHLRKELADKKEKADLRLIYIALAHIIKFRGHFLIEDDSFDVRNTDISKQYQDFLEIFNTTFENNDLLSQNVDVEAILTDKISKSAKKDRILAQYPNQKSTGIFAEFLKLIVGNQADFKKYFNLEDKTPLQFAKDSYDEDLENLLGQIGDEFADLFSAAKKLYDSVLLSGILTVIDLSTKAPLSASMIQRYDEHREDLKQLKQFVKASLPEKYQEIFADSSKDGYAGYIEGKTNQEAFYKYLSKLLTKQEDSENFLEKIKNEDFLRKQRTFDNGSIPHQVHLTELKAIIRRQSEYYPFLKENQDRIEKILTFRIPYYIGPLAREKSDFAWMTRKTDDSIRPWNFEDLVDKEKSAEAFIHRMTNNDFYLPEEKVLPKHSLIYEKFTVYNELTKVRYKNEQGETYFFDSNIKQEIFDGVFKEHRKVSKKKLLDFLAKEYEEFRIVDVIGLDKENKAFNASLGTYHDLEKILDKDFLDNPDNESILEDIVQTLTLFEDREMIKKRLENYKDLFTESQLKKLYRRHYTGWGRLSAKLINGIRDKESQKTILDYLIDDGRSNRNFMQLINDDGLSFKSIISKAQAGSHSDNLKEVVGELAGSPAIKKGILQSLKIVDELVKVMGYEPEQIVVEMARENQTTNQGRRNSRQRYKLLDDGVKNLASDLNGNILKEYPTDNQALQNERLFLYYLQNGRDMYTGEALDIDNLSQYDIDHIIPQAFIKDDSIDNRVLVSSAKNRGKSDDVPSLEIVKDCKVFWKKLLDAKLMSQRKYDNLTKAERGGLTSDDKARFIQRQLVETRQITKHVARILDERFNNELDSKGRRIRKVKIVTLKSNLVSNFRKEFGFYKIREVNNYHHAHDAYLNAVVAKAILTKYPQLEPEFVYGDYPKYNSYKTRKSATEKLFFYSNIMNFFKTKVTLADGTVVVKDDIEVNNDTGEIVWDKKKHFATVRKVLSYPQNNIVKKTEIQTGGFSKESILAHGNSDKLIPRKTKDIYLDPKKYGGFDSPIVAYSVLVVADIKKGKAQKLKTVTELLGITIMERSRFEKNPSAFLESKGYLNIRADKLIILPKYSLFELENGRRRLLASAGELQKGNELALPTQFMKFLYLASRYNESKGKPEEIEKKQEFVNQHVSYFDDILQLINDFSKRVILADANLEKINKLYQDNKENISVDELANNIINLFTFTSLGAPAAFKFFDKIVDRKRYTSTKEVLNSTLIHQSITGLYETRIDLGKLGED

SEQ ID NO: 1181 - protein, 1125 aa, Streptococcus anginosus
MNGLVLGLDIGIASVGVGILNKETGEIIHANSRIFPAATADSNVERRGFRQGRRLGRRKKHRSARLNNLFEEFGFITDFSAIPLNLNPYALRVKGLSEELTNEELFIALKNIIKRRGISYLDDASEDGETASNEYGKAVEENRKLLADKTPGQIQLERFEKYGQVRGDFTVVENGENHRLINVFSTSAYKKEAERILRRQQEFNVRISDEFIEAYLTILTGKRKYYHGPGNEKSRTDYGRFRTDGTTLDNIFGILIGKCTFYPDEYRAAKASYTAQEFNLLNDLNNLTVPTETKKLSPEQKRQIVEYARTAKTLGTPTLLKYIAKLVDGSIDDIKGYRIDKSDKPEMHTFDAYRKMRTLDLVNIDALSRETLDDLAHILTLNTESEGILEALNSKMPSTFTKEQIDELIQFRKKNSAVFGKGWHNFSLKLMNELISELYETSEEQMTILTRLGKQRSREISKRTKYIDEKELTEEIYNPVVAKSVRQAIKIINEATKRYGIFDNIVIEMARENNEEDAKKDYIKRQKANQDEKNASMEKAAFQYNGKKELPDSIFHGHKELATKIRLWHQQGERCLYTGKNISIRDLIHNPHQYEIDHILPLSLSFDDGLANKVLVLATANQEKGQRTPFQAIDSMDDAWSYREFKQYVRNSKSLSNKKKDYLLTEEDISKIEVKQKFIERNLVDTRYSSRVVLNTLQEFYKTNDFDTKISVVRGQFTSQLRRKWKIEKSRDTYHHHAVDALIIAASSQLRLWKKQNNPLISYKEGQFVDPETGEILSLTDDEYKELVFRPPYDYFVDTLKSKSFEDSILFSYQVDSKYNRKISDATIYGTRKAQLGKDKQEETYVLGKIKDIYSQKGYEDFIKRYNKDETQFLIYHKDPQTFEKVIEEILKTYPDKELNEKGKEIPCNPFEKYRQENGPIRKYSKKGKGPEIKSLKYYDNKLGNHIDITPVNSQNQVVLQSLKPWRTDVYFNPRTSKYELMGLKYSDLRFEKGSGSYGISPEKYNKVKAKEGVNEDSEFKFTLYKNDLILIKDTETGEQQLFRYGSRNDTSKHYVELKPYEKAKFEGNQQLMNLLGTVAKGGQCLKGINKPNLSIYKVKTDVLGNKYFIKKEGDQPQLNFKKKF

SEQ ID NO: 1182 - protein, 1386 aa, Streptococcus anginosus
MNQKYSIGLDIGTNSVGWAVITDDYKVPAKKMKVLGNTDKQSIKKNLLGALLFDSGETAEATRLKRTARRRYTRRRNRLRYLQEIFAEEMMQVDESFFQRLDDSFLVDEDKRGERHPIFGNIAAEVKYHDEFPTIYHLRKHLADISQKADLRLVYLALAHMIKFRGHFLIEGQLKAENTNVQALFKDFVEVYDKTVEESHLSEITVDALSILTEKVSKSRRLENLIAHYPAEKKNTLFGNLIALFLGLQPNFKTNFQLSEDAKLQFSKDTYEEDLEGLLGEVGDEYADLFASAKNLYDAILLSGILTVDDNSTKAPLSASMVKRYEEHQKDLKKFEDFIKVNALDQYNAIFKDKNKKGYAGYIESGVKQDEFYKYLKGILLQINGSGDFLDKIDREDFLRKQRTFDNGSIPHQIHLQEMHAILRRQGEHYPFLKENQDKIEKILTFRIPYYVGPLARKGSRFAWAEYKADEKITPWNFDDILDKEKSAEKFITRMTLNDLYLPEEKVLPKHSLLYETFTVYNELTKVKYVNEQGEAKFFDANMKQEIFDHVFKENRKVTKDKLLNYLNKEFEEFRIVNLTGLDKENKVFNSSLGTYHDLRKILNKSFLDNKENAQIIEDIIQTLTLFEDREMIRQRLQKYSDIFTKAQLKKLERRHYTGWGRLSYKLINGIRNKENKKTILDYLIDDGYANRNFMQLINDDALSFKEEIAKAQIIGDVDDIANVVHDLPGSPAIKKGILQSVKIVDELVKVMGHNPANIIIEMARENQTTDRGRRNSQQRLKLLQDSLKNLDNPVNIKNVENQQLQNDRLFLYYIQNGKDMYTGETLDINNLSQYDIDHIIPQAYIKDDSFDNRVLTSSSENRGKSDNVPSIEVVCARKADWMRLRKAGLISQRKFDNLTKAERGGLTENDKAGFIKRQLVETRQITKHVAQVLDARFNAKHDENKKVIRDVKIITLKSNLVSQFRKDFKFYKVREINDYHHAHDAYLNAVIGTALLKKYPKLASEFVYGEFKKYDVRKFIAKSDKEIGKATAKYFFYSNLMNFFKKEVKFADGTVVERPDIETSEDGEIAWNKQTDFKIVRKVLSYPQVNIVKKTEVQTHGLDRGKPRGLFNANPSPKPKPDSSENLVGVKRNLDPKKYGGYAGISNSYAVLVKAIIEKGVKKKETMVLEFQGISILDRITFEKDKRAFLLGKGYKDIKKIIELPKYSLFELKDGSRRMLASILSTNNKRGEIHKGNELFVPQKFTTLLYHAKRINNPINKDHIEYVKKHRDDFKELLNYVLEFNEKYVGATKNGERLKEAVADFDSKSNEEICTSFLGAVNSKNAGLFELTSLGSASDFEFLGVKIPRYRDYTPSSLLKDSTLIHQSITGLYETRIDLSKLGED

SEQ ID NO: 1183 - protein, 1396 aa, Streptococcus anginosus
MTKPYSIGLDIGTNSVGWAVITDDYKVPAKKMKVLGNTNRDYIKKNLLGALLFDGGETAEGRRLKRTARRRYTRRKNRLRYLQEIFAEEMMQVDESFFQRLDDSFLVEEDKQGSKYPIFGTLKEEKEYHKKFKTIYHLREELANSKEKADLRLVYLALAHMIKFRGHFLYEGDLKAENTDVQALFKDFVEEYDKTIEESHLSEITVDALSILTEKVSKSSRLENLIAHYPTEKKNTLFGNLIALSLGLQANFKTNFQLSEDAKLQFSKDTYEEDLEGLLGEVGDEYADLFVSAKNLYDAILLSGILTVDDNSTKAPLSASMVKRYKEHKEELAAFKRFIKEKLPKKYEEIFKDDTKNGYAGYVGADKKLRKRSGKLATEEEFYKYVKGILNKVEGADYFLDKIDREDFLRKQRTFDNGSIPHQIHLQEMHAILRRQGEHYPFLKENQDKIEKILTFRIPYYVGPLARKGSRFAWAEYKADEKITPWNFDDILDKEKSAEKFITRMTLNDLYLPEEKVLPKHSPLYETFTVYNELTKVKYVNEQGEAKFFDTNMKQEIFDHVFKENRKVTKDKLLNYLNKEFEEFRIVNLTGLDKENKAFNASLGTYHDLRKILDKSFLDDKVNEKIIEDIIQTLTLFEDREMIRQRLQKYSDIFTTQQLKELERRHYTGWGRLSYKLINGIRNKENKKTILDYLIDDGYANRNFMQLINDDALSFKEEIARAQIIGDVDDIANVVHDLPGSPAIKKGILQSVKIVDELVKVMGHNPTNIIIEMARENQTTDKGRRNSQQRLKLLQDSLKNLDNPVNIKNVENQQLQNDRLFLYYIQNGKDMYTGETLDINNLSQYDIDHIIPQAFIKDNSLDNRVLTRSDKNRGKSDDVPSIEVVHEMKSFWSKLLSVKLITQRKFDNLTKAERGGLTENDKAGFIKRQLVETRQITKHVAQVLDARFNAKHDENKKVIRDVKIITLKSNLVSQFRKDFKFYKVREINDYHHAHDAYLNAVIGTALLKKYPKLASEFVYGEFKKYDVRKFIAKSDKEIGKATAKYFFYSNLMNFFKKEVKFADGTVVERPDIETSEDGEIAWNKQTDFKIVRKVLSYPQVNIVKKTEVQTHGLDRGKPRGLFNANPSPKPKPDSSENLVGIKRNLDPKKYGGYAGISNSYAVLVKAIIEKGVKKKETMVLEFQGISILDRITFEKDKRAFLLGKGYKDIKKIIELPKYSLFELKDGSRRMLASILSTNNKRGEIHKGNELFVPQKFTTLLYHAKRINNPINKDHIEYVKKHRDDFKELLNYVLEFNEKYVGATKNGERLKEAVADFDSKSNEEICTSFLGAVNSKNAGLFELTSLGSASDFEFLGVKIPRYRDYTPSSLLKDSILIHQSITGLYETRIDLSKLGED

SEQ ID NO: 1184 - protein, 1375 aa, Streptococcus canis
MEKKYSIGLDIGTNSVGWAVITDDYKVPSKKFKVLGNTNRKSIKKNLMGALLFDSGETAEATRLKRTARRRYTRRKNRIRYLQEIFANEMAKLDDSFFQRLEESFLVEEDKKNERHPIFGNLADEVAYHRNYPTIYHLRKKLADSPEKADLRLIYLALAHIIKFRGHFLIEGKLNAENSDVAKLFYQLIQTYNQLFEESPLDEIEVDAKGILSARLSKSKRLEKLIAVFPNEKKNGLFGNIIALALGLTPNFKSNFDLTEDAKLQLSKDTYDDDLDELLGQIGDQYADLFSAAKNLSDAILLSDILRSNSEVTKAPLSASMVKRYDEHHQDLALLKTLVRQQFPEKYAEIFKDDTKNGYAGYVGIGIKHRKRTTKLATQEEFYKFIKPILEKMDGAEELLAKLNRDDLLRKQRTFDNGSIPHQIHLKELHAILRRQEEFYPFLKENREKIEKILTFRIPYYVGPLARGNSRFAWLTRKSEEAITPWNFEEVVDKGASAQSFIERMTNFDEQLPNKKVLPKHSLLYEYFTVYNELTKVKYVTERMRKPEFLSGEQKKAIVDLLFKTNRKVTVKQLKEDYFKKIECFDSVEIIGVEDRFNASLGTYHDLLKIIKDKDFLDNEENEDILEDIVLTLTLFEDREMIEERLKTYAHLFDDKVMKQLKRRHYTGWGRLSRKMINGIRDKQSGKTILDFLKSDGFSNRNFMQLIHDDSLTFKEEIEKAQVSGQGDSLHEQIADLAGSPAIKKGILQTVKIVDELVKVMGHKPENIVIEMARENQTTTKGLQQSRERKKRIEEGIKELESQILKENPVENTQLQNEKLYLYYLQNGRDMYVDQELDINRLSDYDVDHIVPQSFIKDDSIDNKVLTRSVENRGKSDNVPSEEVVKKMKNYWRQLLNAKLITQRKFDNLTKAERGGLSEADKAGFIKRQLVETRQITKHVARILDSRMNTKRDKNDKPIREVKVITLKSKLVSDFRKDFQLYKVRDINNYHHAHDAYLNAVVGTALIKKYPKLESEFVYGDYKVYDVRKMIAKSEQEIGKATAKRFFYSNIMNFFKTEVKLANGEIRKRPLIETNGETGEVVWNKEKDFATVRKVLAMPQVNIVKKTEVQTGGFSKESILSKRESAKLIPRKKGWDTRKYGGFGSPTVAYSILVVAKVEKGKAKKLKSVKVLVGITIMEKGSYEKDPIGFLEAKGYKDIKKELIFKLPKYSLFELENGRRRMLASATELQKANELVLPQHLVRLLYYTQNISATTGSNNLGYIEQHREEFKEIFEKIIDFSEKYILKNKVNSNLKSSFDEQFAVSDSILLSNSFVSLLKYTSFGASGGFTFLDLDVKQGRLRYQTVTEVLDATLIYQSITGLYETRTDLSQLGGD

SEQ ID NO: 1185 - protein, 1345 aa, Streptococcus constellatus
MGKPYSIGLDIGTNSVGWAVVTDDYKVPAKKMKVLGNTDKQSIKKNLLGALLFDSGETAEATRLKRTARRRYTRRKNRLRYLQEIFTGEMNKVDENFFQRLDDSFLVDEDKRGEHHPIFGNIAAEVKYHDDFPTIYHLRRHLADTSKKADLRLVYLALAHMIKFRGHFLYEGDLKAENTDVQALFKDFVEEYDKTIEESHLSEITVDALSILTEKVSKSSRLENLIAHYPTEKKNTLFGNLIALSLDLHPNFKTNFQLSEDAKLQFSKDTYEEDLEGFLGEVGDEYADLFASAKNLYDAILLSGILTVDDNSTKAPLSASMVKRYEEHQKDLKKLKDFIKVNAPDQYNAIFKDKNKKGYASYIESGVKQDEFYKYLKGILLKINGSGDFLDKIDREDFLRKQRTFDNGSIPHQIHLQEMHAILRRQGEHYPFLKENQDKIEKILTFRIPYYVGPLARKGSRFAWAEYKADEKITPWNFDDILDKEKSAEKFITRMTLNDLYLPEEKVLPKHSPLYEAFTVYNELTKVKYVNEQGEAKFFDTNMKQEIFDHVFKENRKVTKDKLLNYLNKEFEEFRIVNLTGLDKENKAFNSSLGTYHDLRKILDKSFLDDKANEKTIEDIIQTLTLFEDREMIRQRLQKYSDIFTKAQLKKLERRHYTGWGRLSYKLINGIRNKENKKTILDYLIDDGYANRNFMQLINDDALSFKEEIARAQIIDDVDDIANVVHDLPGSPAIKKGILQSVKIVDELVKVMGHNPANIIIEMARENQTTDKGRRNSQQRLKLLQDSLKNLDNPVNIKNVENQQLQNDRLFLYYIQNGKDMYTGETLDINNLSQYDIDHIIPQAFIKDNSLDNRVLTRSDKNRGKSDDVPSIEVVHEMKSFWSKLLSVKLITQRKFDNLTKAERGGLTEEDKAGFIKRQLVETRQITKHVAQILDERFNTEFDGNKRRIRNVKIITLKSNLVSNFRKEFELYKVREINDYHHAHDAYLNAVVGNALLLKYPQLEPEFVYGEYPKYNSYRSRKSATEKFLFYSNILRFFKKEDIQTNEDGEIAWNKEKHIKILRKVLSYPQVNIVKKTEEQTGGFSKESILPKGESDKLIPRKTKNSYWDPKKYGGFDSPVVAYSILVFADVEKGKSKKLRKVQDMVGITIMEKKRFEKNPVDFLEQRGYRNVRLEKIIKLPKYSLFELENKRRRLLASAKELQKGNELVIPQRFTTLLYHSYRIEKDYEPEHREYVEKHKDEFKELLEYISVFSRKYVLADNNLTKIEMLFSKNKDAEVSSLAKSFISLLTFTAFGAPAAFNFFGENIDRKRYTSVTECLNATLIHQSITGLYETRIDLSKLGED

SEQ ID NO: 1186 - protein, 538 aa, Streptococcus dysgalactiae
DYDVDHIVPQSFIKDDSIDNKVLTRSDKNRGKSDNVPSEEVVKKMKNYWRQLLNAKLITQRKFDNLTKAERGGLSELDKAGFIKRQLVETRQITKHVAQILDSRMNTKYDENDKLIREVKVITLKSKLVSDFRKDFQFYKVREINNYHHAHDAYLNAVVGTALIKKYPKLESEFVYGDYKVYDVRKMIAKSEQEIGKATAKRFFYSNIMNFFKTEITLANGEIRKRPLIETNEETGEIVWDKGRDFATVRKVLSMPQVNIVKKTEVQTGALTNESIYARGSFDKLISRKHRFESSKYGGFGSPTVTYSVLVVAKSKVQDGKVKKIKTGKELIGITLLDKLVFEKNPLKFIEDKGYGNVQIDKCIRLPKYSLFEFENGTRRMLASVMANNNSRGDLQKANEMFLPAKLVTLLYHAHKIESSKELEHEAYILDHYNDLYQLLSYIERFASLYVDVEKNISKVKELFSNIESYSISEICSSVINLLTLTASGAPADFKFLGTTIPRKRYGSPQSILSSTLIHQSITGLYETRIDLSQLGGD

SEQ ID NO: 1187 - protein, 1155 aa, Streptococcus dysgalactiae
MDKKYSIGLDIGTNSVGWAVITDDYKVPSKKFKVLGNTDRHSIKKNLIGALLFDSGETAEATRLKRSARRRYTRRKNRIRYLQEIFSSEMSKVDDSFFHRLEESFLVEEDKKHERHPIFGNIVDEVAYHEKYPTIYHLRKKLADSTDKADLRLIYLALAHMIKFRGHFLIEGDLNPDNSDMDKLFIQLVQTYNQLFEENPINASRVDAKAILSARLSKSRRLENLIAQLPGEKRNGLFGNLIALSLGLTPNFKSNFDLAEDAKLQLSKDTYDDDLDNLLAQIGDQYADLFLAAKNLSDAILLSDILRVNSEITKAPLSASMIKRYDEHHQDLTLLKALVRQQLPEKYKEIFFDQSKNGYAGYIDGGASQEEFYKFIKPILEKMDGTEELLAKLNREDLLRKQRTFDNGSIPHQIHLGELHAILRRQEDFYPFLKDNREKIEKILTFRIPYYVGPLARGNSRFAWMTRKSEETITPWNFEEVVDKGASAQSFIERMTNFDKNLPNEKVLPKHSLLYEYFTVYNELTKVKYVTEGMRKPEFLSGKQKEAIVDLLFKTNRKVTVKQLKEDYFKKIECFDSVEISGVEDRFNASLGTYHDLLKIIKDKDFLDNEENEDILEDIVLTLTLFEDKEMIEERLKTYAHLFDDKVMKQLKRRHYTGWGRLSRKLINGIRDKQSGKTILDFLKSDGFANRNFIQLIHDDSLTFKEAIQKAQVSGQGHSLHEQIANLAGSPAIKKGILQSVKVVDELVKVMGHKPENIVIEMARENQTTQKGQKNSRERMKRIEEGIKELGSQILKEHPVENTQLQNEKLYLYYLQNRRDMYVDQELDINRLSDYDVDHIVPQSFIKDDSIDNKVLTRSDKNRGKSDDVPSEEVVKKMKNYWRQLLNAKLITQRKFDNLTKAERGGLSELDKAGFIKRQLVETRQITKHVAQILDSRMNTKYDENDKLIREVKVITLKSKLVSDFRKDFQFYKVREINNYHHAHDAYLNAVVGTALIKKYPKLESEFVYGDYKVYDVRKMIAKSEQEIGKATAKRFFYSNIMNFFKTEITLANGEIRKRPLIETNEETGEIVWDKGRDFATVRKVLSMPQVNIVKKTEVQTGALTNESIYARGSFDKLISRKHRFESSKYGGFGSPTVTYSVLVVAKYQSYKMEK

SEQ ID NO: 1188 - protein, 1371 aa, Streptococcus dysgalactiae
MDKKYSIGLDIGTNSVGWAVITDDYKVPSKKFKVLGNTDRHSIKKNLIGALLFDSGETAEATRLKRTARRRYTRRKNRIRYLQEIFSSEMSKVDDSFFHRLEESFLVEEDKKHERHPIFGNIVDEVAYHEKYPTIYHLRKKLADSTDKADLRLIYLALAHMIKFRGHFLIEGDLNPDNSDMDKLFIQLVQTYNQLFEENPINASRVDAKAILSARLSKSRRLENLIAQLPGEKRNGLFGNLIALSLGLTPNFKSNFDLAEDAKLQLSKDTYDDDLDNLLAQIGDQYADLFLAAKNLSDAILLSDILRVNSEITKAPLSASMIKRYDEHHQDLTLLKALVRQQLPEKYKEIFFDQSKNGYAGYIDGGASQEEFYKFIKPILEKMDGTEELLAKLNREDLLRKQRTFDNGSIPHQIHLGELHAILRRQEDFYPFLKDNREKIEKILTFRIPYYVGPLARGNSRFAWMTRKSEETITPWNFEEVVDKGASAQSFIERMTNFDKNLPNEKVLPKHSLLYEYFTVYNELTKVKYVTEGMRKPEFLSGKQKEAIVDLLFKTNRKVTVKQLKEDYFKKIECFDSVEISGVEDRFNASLGTYHDLLKIIKDKDFLDNEENEDILEDIVLTLTLFEDKEMIEERLKTYAHLFDDKVMKQLKRRHYTGWGRLSRKLINGIRDKQSGKTILDFLKSDGFANRNFIQLIHDDSLTFKEAIQKAQVSGQGHSLHEQIANLAGSPAIKKGILQSVKVVDELVKVMGHKPENIVIEMARENQTTQKGQKNSRERMKRIEEGIKELGSQILKEHPVENTQLQNEKLYLYYLQNGRDMYVDQELDINRLSDYDVDHIVPQSFIKDDSIDNKVLTRSDKNRGKSDDVPSEEVVKKMKNYWRQLLNAKLITQRKFDNLTKAERGGLSELDKAGFIKRQLVETRQITKHVAQILDSRMNTKYDENDKLIREVKVITLKSKLVSDFRKDFQFYKVREINNYHHAHDAYLNAVVGTALIKKYPKLESEFVYGDYKVYDVRKMIAKSEQEIGKATAKRFFYSNIMNFFKTEITLANGEIRKRPLIETNEETGEIVWNKGRDFATVRKVLSMPQVNIVKKTEVQTGALTNESIYARGSFDKLISRKHRFESSKYGGFGSPTVTYSVLVVAKSKVQDGKVKKIKTGKELIGITLLDKLVFEKNPLKFIEDKGYGNVQIDKCIKLPKYSLFEFENGTRRMLASVMANNNSRGDLQKANEMFLPAKLVTLLYHAHKIESSKELEHEAYILDHYNDLYQLLSYIERFASLYVDVEKNISKVKELFSNIESYSISEICSSVINLLTLTASGAPADFKFLGTTIPRKRYGSPQSILSSTLIHQSITGLYETRIDLSQLGGD

SEQ ID NO: 1189 - protein, 1371 aa, Streptococcus dysgalactiae
MDKKYSIGLDIGTNSVGWAVITDDYKVPSKKFKVLGNTDRHSIKKNLIGALLFDSGETAEATRLKRTARRRYTRRKNRIRYLQEIFSSEMSKVDDSFFHRLEESFLVEEDKKHERHPIFGNIVDEVAYHEKYPTIYHLRKKLADSTDKADLRLIYLALAHMIKFRGHFLIEGDLNPDNSDMDKLFIQLVQTYNQLFEENPINASRVDAKAILSARLSKSRRLENLIAQLPGEKRNGLFGNLIALSLGLTPNFKSNFDLAEDAKLQLSKDTYDDDLDNLLAQIGDQYADLFLAAKNLSDAILLSDILRVNSEITKAPLSASMIKRYDEHHQDLTLLKALVRQQLPEKYKEIFFDQSKNGYAGYIDGGASQEEFYKFIKPILEKMDGTEELLAKLNREDLLRKQRTFDNGSIPHQIHLGELHAILRRQEDFYPFLKDNREKIEKILTFRIPYYVGPLARGNSRFAWMTRKSEETITPWNFEEVVDKGASAQSFIERMTNFDKNLPNEKVLPKHSLLYEYFTVYNELTKVKYVTEGMRKPEFLSGKQKEAIVDLLFKTNRKVTVKQLKEDYFKKIECFDSVEISGVEDRFNASLGTYHDLLKIIKDKDFLDNEENEDILEDIVLTLTLFEDKEMIEERLKKYANLFDDKVMKQLKRRHYTGWGRLSRKLINGIRDKQSGKTILDFLKSDGFANRNFMQLINDDSLTFKEAIQKAQVSGQGHSLHEQIANLAGSPAIKKGILQSVKVVDELVKVMGHKPENIVIEMARENQTTQKGQKNSRERMKRIEEGIKELGSQILKEHPVENTQLQNEKLYLYYLQNGRDMYVDQELDINRLSDYDVDHIVPQSFIKDDSIDNKVLTRSDKNRGKSDNVPSEEVVKKMKNYWRQLLNAKLITQRKFDNLTKAERGGLSELDKAGFIKRQLVETRQITKHVAQILDSRMNTKYDENDKLIREVKVITLKSKLVSDFRKDFQFYKVREINNYHHAHDAYLNAVVGTALIKKYPKLESEFVYGDYKVYDVRKMIAKSEQEIGKATAKRFFYSNIMNFFKTEITLANGEIRKRPLIETNEETGEIVWDKGRDFATVRKVLSMPQVNIVKKTEVQTGALTNESIYARGSFDKLISRKHRFESSKYGGFGSPTVTYSVLVVAKSKVQDGKVKKIKTGKELIGITLLDKLVFEKNPLKFIEDKGYGNVQIDKCIKLPKYSLFEFENGTRRMLASVMANNNSRGDLQKANEMFLPAKLVTLLYHAHKIESSKELEHEAYILDHYNDLYQLLSYIERFASLYVDVEKNISKVKELFSNIESYSISEICSSVINLLTLTASGAPADFKFLGTTIPRKRYGSPQSILSSTLIHQSITGLYETRIDLSQLGGD

SEQ ID NO: 1190 - protein, 1371 aa, Streptococcus dysgalactiae
MDKKYSIGLDIGTNSVGWAVITDDYKVPSKKFKVLGNTDRHSIKKNLIGALLFDSGETAEATRLKRTARRRYTRRKNRIRYLQEIFSSEMSKVDDSFFHRLEESFLVEEDKKHERHPIFGNIVDEVAYHEKYPTIYHLRKKLADSTDKADLRLIYLALAHMIKFRGHFLIEGDLNPDNSDVDKLFIQLVQTYNQLFEEKPINASGVDAKAILSARLSKSKRLENLIAQLPGEKKNGLFGNLIALSLGLTPNFKSNFDLAEDAKLQLSKDTYDDDLDNLLAQIGNQYADLFLAAKNLSDAILLSDILRVNSEITKAPLSASMIKRYDEHHQDLTLLKALVRQQLPEKYKEIFFDQSKNGYAGYIDGGASQEEFYKFIKPILEKMDGTEELLAKLNREDLLRKQRTFDNGSIPHQIHLGELHAILRRQEDFYPFLKDNREKIEKILTFRIPYYVGPLARGNSRFAWMTRKSEETITPWNFEEVVDKGASAQSFIERMTNFDKNLPNEKVLPKHSLLYEYFTVYNELTKVKYVTEGMRKPEFLSGKQKEAIVDLLFKTNRKVTVKQLKEDYFKKIECFDSVEISGVEDRFNASLGTYHDLLKIIKDKDFLDNEENEDILEDIVLTLTLFEDKEMIEERLKKYANLFDDKVMKQLKRRHYTGWGRLSRKLINGIRDKQSGKTILDFLKSDGFANRNFMQLINDDSLTFKEAIQKAQVSGQGHSLHEQIANLAGSPAIKKGILQSVKVVDELVKVMGHKPENIVIEMARENQTTQKGQKNSRERMKRIEEGIKELGSQILKEHPVENTQLQNEKLYLYYLQNGRDMYVDQELDINRLSDYDVDHIVPQSFIKDDSIDNKVLTRSDKNRGKSDNVPSEEVVKKMKNYWRQLLNAKLITQRKFDNLTKAERGGLSELDKAGFIKRQLVETRQITKHVAQILDSRMNTKYDENDKLIREVKVITLKSKLVSDFRKDFQFYKVREINNYHHAHDAYLNAVVGTALIKKYPKLESEFVYGDYKVYDVRKMIAKSEQEIGKATAKRFFYSNIMNFFKTEITLANGEIRKRPLIETNEETGEIVWDKGRDFATVRKVLSMPQVNIVKKTEVQTGALTNESIYARGSFDKLISRKHRFESSKYGGFGSPTVTYSVLVVAKSKVQDGKVKKIKTGKELIGITLLDKLVFEKNPLKFIEDKGYGNVQIDKCIKLPKYSLFEFENGTRRMLASVMANNNSRGDLQKANEMFLPAKLVTLLYHAHKIESSKELEHEAYILDHYNDLYQLLSYIERFASLYVDVEKNISKVKELFSNIESYSISEICSSVINLLTLTASGAPADFKFLGTTIPRKRYGSPQSILSSTLIHQSITGLYETRIDLSQLGGD

SEQ ID NO: 1191 - protein, 1370 aa, Streptococcus gallolyticus; identical to SEQ ID NO: 204

SEQ ID NO: 1192 - protein, 1375 aa, Streptococcus infantarius
MEKSYSIGLDIGTNSVGWAVITDDYKVPAKKMKVLGNTDKKYIKKNLLGALLFDSGETAEVTRLKRTARRRYTRRKNRLRYLQEIFAKEMTKVDESFFQRLEESFLTDDDKTFDSHPIFGNKAEEDAYHQKFPTIYHLRKYLADSQEKADLRLVYLALAHMIKYRGHFLIEGELNAENTDVQKLFNVFVETYDKIVDESHLSEIEVDASSILTEKVSKSRRLENLIKQYPTEKKNTLFGNLIALALGLQPNFKTNFKLSEDAKLQFSKDTYEEDLEELLGKVGDDYADLFISAKNLYDAILLSGILTVDDNSTKAPLSASMIKRYVEHHEDLEKLKEFIKINKLKLYHDIFKDKTKNGYAGYIDNGVKQDEFYKYLKTILTKIDDSDYFLDKIERDDFLRKQRTFDNGSIPHQIHLQEMHSILRRQGDYYPFLKENQAKIEKILTFRIPYYVGPLARKDSRFAWANYHSDEPITPWNFDEVVDKEKSAEKFITRMTLNDLYLPEEKVLPKHSHVYETFTVYNELTKIKYVNEQGESFFFDANMKQEIFDHVFKENRKVTKAKLLSYLNNEFEEFRINDLIGLDKDSKSFNASLGTYHDLKKILDKSFLDDKTNGQIIEDIVLTLTLFEDRDMIHERLQKYSDFFTSQQLKKLERRHYTGWGRLSYKLINGIRNKENNKTILDFLIDDGHANRNFMQLINDESLSFKTIIQEAQVVGDVDDIEAVVHDLPGSPAIKKGILQSVKIVDELVKVMGDNPDNIVIEMARENQTTGYGRNKSNQRLKRLQDSLKEFGSDILSKKKPSYVDSKVENSHLQNDRLFLYYIQNGKDMYTGEELDIDRLSDYDIDHIIPQAFIKDNSIDNKVLTSSAKNRGKSDDVPSIEIVRNRRSYWYKLYKSGLISKRKFDNLTKAERGGLTEADKAGFIKRQLVETRQITKHVAQILDARFNTKRDENDKVIRDVKVITLKSNLVSQFRKEFKFYKVREINDYHHAHDAYLNAVVGTALLKKYPKLTPEFVYGEYKKYDVRKLIAKSSDDYSEMGKATAKYFFYSNLMNFFKTEVKYADGRVFERPDIETNADGEVVWNKQKDFDIVRKVLSYPQVNIVKKVEAQTGGFSKESILSKGDSDKLIPRKTKKVYWNTKKYGGFDSPTVAYSVLVVADIEKGKAKKLKTVKELVGISIMERSFFEENPVSFLEKKGYHNVQEDKLIKLPKYSLFEFEGGRRRLLASATELQKGNEVMLPAHLVELLYHAHRIDSFNSTEHLKYVSEHKKEFEKVLSCVENFSNLYVDVEKNLSKVRAAAESMTNFSLEEISASFINLLTLTALGAPADFNFLGEKIPRKRYTSTKECLSATLIHQSVTGLYETRIDLSKLGEE

SEQ ID NO: 1193 - protein, 1368 aa, Streptococcus iniae
MRKPYSIGLDIGTNSVGWAVITDDYKVPSKKMRIQGTTDRTSIKKNLIGALLFDNGETAEATRLKRTTRRRYTRRKYRIKELQKIFSSEMNELDIAFFPRLSESFLVSDDKEFENHPIFGNLKDEITYHNDYPTIYHLRQTLADSDQKADLRLIYLALAHIIKFRGHFLIEGNLDSENTDVHVLFLNLVNIYNNLFEEDIVETASIDAEKILTSKTSKSRRLENLIAEIPNQKRNMLFGNLVSLALGLTPNFKTNFELLEDAKLQISKDSYEEDLDNLLAQIGDQYADLFIAAKKLSDAILLSDIITVKGASTKAPLSASMVQRYEEHQQDLALLKNLVKKQIPEKYKEIFDNKEKNGYAGYIDGKTSQEEFYKYIKPILLKLDGTEKLISKLEREDFLRKQRTFDNGSIPHQIHLNELKAIIRRQEKFYPFLKENQKKIEKLFTFKIPYYVGPLANGQSSFAWLKRQSNESITPWNFEEVVDQEASARAFIERMTNFDTYLPEEKVLPKHSPLYEMFMVYNELTKVKYQTEGMKRPVFLSSEDKEEIVNLLFKKERKVTVKQLKEEYFSKMKCFHTVTILGVEDRFNASLGTYHDLLKIFKDKAFLDDEANQDILEEIVWTLTLFEDQAMIERRLVKYADVFEKSVLKKLKKRHYTGWGRLSQKLINGIKDKQTGKTILGFLKDDGVANRNFMQLINDSSLDFAKIIKNEQEKTIKNESLEETIANLAGSPAIKKGILQSIKIVDEIVKIMGQNPDNIVIEMARENQSTMQGIKNSRQRLRKLEEVHKNTGSKILKEYNVSNTQLQSDRLYLYLLQDGKDMYTGKELDYDNLSQYDIDHIIPQSFIKDNSIDNTVLTTQASNRGKSDNVPNIETVNKMKSFWYKQLKSGAISQRKFDHLTKAERGALSDFDKAGFIKRQLVETRQITKHVAQILDSRFNSNLTEDSKSNRNVKIITLKSKMVSDFRKDFGFYKLREVNDYHHAQDAYLNAVVGTALLKKYPKLEAEFVYGDYKHYDLAKLMIQPDSSLGKATTRMFFYSNLMNFFKKEIKLADDTIFTRPQIEVNTETGEIVWDKVKDMQTIRKVMSYPQVNIVMKTEVQTGGFSKESIWPKGDSDKLIARKKSWDPKKYGGFDSPIIAYSVLVVAKIAKGKTQKLKTIKELVGIKIMEQDEFEKDPIAFLEKKGYQDIQTSSIIKLPKYSLFELENGRKRLLASAKELQKGNELALPNKYVKFLYLASHYTKFTGKEEDREKKRSYVESHLYYFDEIMQIIVEYSNRYILADSNLIKIQNLYKEKDNFSIEEQAINMLNLFTFTDLGAPSAFKFFNGDIDRKRYSSTNEIINSTLIYQSPTGLYETRIDLSKLGGK

SEQ ID NO: 1194 - protein, 1392 aa, Streptococcus mitis
MNNNNYSIGLDIGTNSVGWAVITDDYKVPSKKMKVLGNTDKHFIKKNLIGALLFDEGATAEDRRFKRTARRRYTRRKNRLRYLQEIFSEEMSKVDSSFFHRLDDSFLVPEDKRGSKYPIFATLAEEKEYHKKFPTIYHLRKHLADSKEKTDLRLIYLALAHMIKYRGHFLYEESFDIKNNDIQKIFSEFISIYDNTFEGSSLSGQNAQVEAIFTDKISKSAKRERILKLFAYEKSTDLFSEFLKLIVGNQADFKKHFDLEEKAPLQFSKDTYDEDLENLLGQIGDDFADLFLVAKKLYDAILLSGILTVTDSSTKAPLSASMIERYENHQKDLAALKQFIQNNLQEKYDEVFSDQSKDGYARYINGKTTQEAFYKYIKNLLSKFEGSDYFLDKIEREDFLRKQRTFDNGSIPHQIHLQEMNAIIRRQGEHYPFLKEYKEKIETILTFRIPYYVGPLARGNRNFAWLTRNSDQAIRPWNFEEIVDQASSAEEFINKMTNYDLYLPEEKVLPKHSLLYETFAVYNELTKVKFISEGLRDYQFLDSGQKKQIVNQLFKEKRKVTEKDIIQYLHNVDGYDGIELKGIEKQFNASLSTYHDLLKIIKDKEFMDDPKNEEILENIVHTLTIFEDREMIKQRLAQYASIFDKKVIKALTRRHYTGWGKLSAKLINGICDKKTGKTILDYLIDDGYSNRNFMQLINDDGLSFKDIIQKAQVVGKTNDVKQVVQELPGSPAIKKGILQSIKLVDELVKVMGHAPESIVIEIARENQTTARGKKNSQQRYKRIEDALKNLAPGLDSNILKEHPTDNIQLQNDRLFLYYLQNGKDMYTGEALDINQLSSYDIDHIVPQAFIKDDSLDNRVLTSSKDNRGKSDNVPSLEVVQKRKAFWQQLLDSKLISEHKFNNLTKAERGGLDERDKVGFIRRQLVETRQITKHVAQILDARFNTEVNEKDKKNRTVKIITLKSNLVSNFRKEFKLYKVREINDYHHAHDAYLNAVVAKAILKKYPKLEPGFVYGDYQKYDIKRYISRSKDPKEVEKATEKYFFYSNLLNFFKEEVHYADGTIVKRENIEYSKDTGEIAWNKEKDFATIKKVLSLPQVNIVKKTEIQTHGLDRGKPRGLFNSNPSPKPSEDRKENLVPIKQGLDPRKYGGYAGISNSYAVLVKAIIEKGAKKQQKTVLEFQGISILDKINFEKNKENYLLEKGYIKILSTITLPKYSLFEFPDGTRRRLASILSTNNKRGEIHKGNELVIPEKYTTLLYHAKNINKTLEPEHLEYVEKHRNDFAKLLEYVLNFNDKYVGALKNGERIRQAFIDWETVDIEKLCFSFIGPRNSKNAGLFELTSQGSASDFEFLGVKIPRYRDYTPSSLLNATLIHQSITGLYETRIDLSKLGED

SEQ ID NO: 1195 - protein, 1134 aa, Streptococcus mutans
MANGKILGLDIGIASVGVGIIDKETGKIIHVNSRIFPAATADSNVERRGFRQGRRLVRRKKHRKVRLADLFLDSNLLTDFSKVSLNLNPYQLRVKGLNEELSNEELFIALKSIVSRRGISYLDDASEDSGANSSEYGKAVEENRKLLEDRTPGQIQLERFEKYGKVRGDFTVVENGENHRLINVFSTSAYKKEAERILRRQQEFNMRIADEFIEAYLTILTGKRKYYHGPGNEKSRTDYGRFRTDGTTLDNIFGILIGKCTFYPDEYRAAKASYTAQEFNLLNDLNNLTVPTETKKLSEEQKRQIIEHAKTVKTLGAPTLLKYIVKLVGCSADDIKGYRIDKSDKPEIHTFEAYRKMRTMELIKVDDLSRESLDALAHILTLNTEREGIEEAIRDRFTNKEFNQEQINELVLFRKNNSSLFGKGWHNFSLKLMKELIPELYETSEEQMTILTRLGKQRVKKSSNRTNYIDEKELTEEIYNPVVAKSVRQAIKIINLATKKYGVFDNIVIEMARESNEDDEKKAIQNAQKANEDEKKAALLKAAHQFNGKEELPDSIFHGHKELLTKIRLWHQQGEKCLYTGKTIFINDLIHNPYKYEIDHILPLSLSFDDSLANKVLVLSTANQEKGQRTPFQSLDSMDGAWTYREFKSYVKGLKTLSNKKKDYLLTEENIDKIEVKQKFIERNLVDTRYSSRVVLNALQDFYKERKFDTKISVVRGQFTSQLRRKWRIEKTRETYHHHAVDALIIAASSQLNLWKKQNNPLISYKEDQFVDPETGEILSLSDDEYKKLVFKAPYEHFVDTLKSKKFEDSILFSYQVDSKYNRKISGATICGTRKAQLGKDTQEETYVLGKIKDIYSQKGYEDFIKKYKKDKTQFLMYHKDPQTFEKVIEEILKTYPDKELNEKGKEVSCNPFEKYRQENGPVRKYSKKGNGPEIKSLKYYDEVLGKNIDITPKNSLNKVVLRSLNPWRTDVYFNHETRKYEFLGLKYSDLRYLKGEHRYGILIGDYKKIKDKEGIEKESEFKFTLYKNDLILIKDTAKGKEELFRFWSRTGKDNAKTFEKNKIELKPYSKSQFEKGEDTNVLGKLYASSNQLQKSFGTLENLSIYKVRTDVLGNKYFIKKEGDKPQLNFKKKL

SEQ ID NO: 1196 - protein, 1134 aa, Streptococcus mutans; identical to SEQ ID NO: 1195

SEQ ID NO: 1197 - protein, 1128 aa, Streptococcus mutans
MANSKILGLDIGIASVGVGIIDKETGKIIHVNSRIFPAATADSNVERRGFRQGRRLVRRKKHRKVRLADLFLDSNLLTDFSKVSLNLNPYQLRVKGLNEELSNEELFIALKSIVSRRGISYLDDASEDSGANSSEYGKAVEENRKLLEDRTPGQIQLERFEKYGKVRGDFTVVENGENHRLINVFSTSAYKKEAERILRRQQEFNIRIADEFIEAYLTILTGKRKYYHGPGNEKSRTDYGRFRTDGTTLDNIFGILIGKCTFYPDEYRAAKASYTAQEFNLLNDLNNLTVPTETKKLSEEQKRQIIEHAKTVKTLGAPTLLKYIAKLVGCSADDIKGYRIDKSDKPEIHTFEAYRKMRTMELIKVADLSRESLDALAHILTLNTEREGIEEAIRDRFTNKEFNQEQINELVLFRKNNSSLFGKGWHNFSLKLMKELIPELYETSEEQMTILTRLGKQRVKKSSNRTNYIDEKELTEEIYNPVVAKSVRQAIKIINLATKKYGVFDNIVIEMARESNEDDEKKAIQNAQKANEDEKEAALLKAAHQFNGKEELPDSIFHGHKELLTKIRLWHQQGEKCLYTGKTIFINDLIHNPYKYEIDHILPLSLSFDDSLANKVLVLSTANQEKGQRTPFQSLDSMDGAWTYREFKAYVKGLKTLSNKKKDYLLNEEDINKNEVKQKFIERNLVDTRYSSRVVLNTLQDFYKKREFDTKISVVRGQFTSQIRRKWRIEKTRETYHHHAVDALIIAASSQLNLWKKQNNPLISYKEDQFVDPETGEILSLSDDEYKELVFKAPYDHFVDTLKSKKFEDSILFSYQVDSKYNRKISDATIYGTRKARLGKDSQEETYVLGKIKDIYSQKGYEDFIKKYKKDKTQFLMYHKDPQTFEKVIEEILKTYSDKELNEKGKEVPCNPFEKYRQENGPVRKYSKKGNGPEIKSIKYYDNKLGNHIDITPNNSHHQVVLQSLKPWRTDVYFNPKSGKYELMGLKYSDLRFEKVSGDYGISVKKYNEIKSKEGVDENSEFKFTLYKNDLILIKDTESGEQELFRFLSRTMPNQKHYVELKPYDKSKFEGHQKLMDIFGEVAKGGQCLKGLNKSNISIYKVKTDVLGNKYFIKKEGDQPQLNFKKKI

SEQ ID NO: 1198 - protein, 1128 aa, Streptococcus mutans; identical to SEQ ID NO: 1197

SEQ ID NO: 1199 - protein, 1338 aa, Streptococcus mutans
MDLIGTNSVGWAVVTDDYKVPAKKMKVLGNTDKSHIKKNLLGALLFDSGNTAADRRLKRTARRRYTRRRNRILYLQEIFAEEMSKVDDSFFHRLEDSFLVTEDKRGERHPIFGNLEEEVKYHENFPTIYHLRQYLADNPEKVDLRLVYLALAHIIKFRGHFLIEGKFDTRNNDVQRLFQEFLAVYDNTFENSSLQEQNVQVEEILTDKISKSAKKDRVLKLFPNEKSNGRFAEFLKLIVGNQADFKKHFELEEKAPLQFSKDTYEEELEVLLAQIGDNYAELFLSAKKLYDSILLSGILTVTDVSTKAPLSASMIQRYNEHQMDLAQLKQFIRQKLSDKYNEVFSDVSKDGYAGYIDGKTNQEAFYKYLKGLLNKIEGSGYFLDKIEREDFLRKQRTFDNGSIPHQIHLQEMRAIIRRQAEFYPFLADNQDRIEKILTFRIPYYVGPLARGKSDFAWLSRKSADKITPWNFDEIVDKESSAEAFINRMTNYDLYLPNQKVLPKHSLLYEKFTVYNELTKVKYKTEQGKTAFFDANMKQEIFDGVFKVYRKVTKDKLMDFLEKEFDEFRIVDLTGLDKENKAFNASYGTYHDLRKILDKDFLDNSKNEKILEDIVLTLTLFEDREMIRKRLENYSDLLTKEQVKKLERRHYTGWGRLSAELIHGIRNKESRKTILDYLIDDGNSNRNFMQLINDDALSFKEEIAKAQVIGETDNLNQVVSDIAGSPAIKKGILQSLKIVDELVKIMGHQPENIVVEMARENQFTNQGRRNSQQRLKGLTDSIKEFGSQILKEHPVEHSQLQNDRLFLYYLQNGRDMYTGEELDIDYLSQYDIDHIIPQAFIKDNSIDNRVLTSSKENRGKSDDVPSKNVVRKMKSYWSKLLSAKLITQRKFDNLTKAERGGLTDDDKAGFIKRQLVETRQITKHVARILDERFHTETDENNKKIRQVKIVTLKSNLVSNFRKEFELYKVREINDYHHAHDAYLNAVIGKALLGVYPQLEPEFVYGDYPHFHGHKENKATAKKFFYSNIMNFFKKDDVRTDKNGEIIWKKDEHISNIKKVLSYPQVNIVKKVEEQTGGFSKESILPKGNSDKLIPRKTKKFYWDTKKYGGFDSPIVAYSILVIADIEKGKSKKLKTVKALVGVTIMEKMTFERDPVAFLERKGYRNVQEENIIKLPKYSLFKLENGRKRLLASARELQKGNEIVLPNHLGTLLYHAKNIHKVDEPKHLDYVDKHKDEFKELLDVVSNFSKKYTLAEGNLEKIKELYAQNNGEDLKELASSFINLLTFTAIGAPATFKFFDKNIDRKRYTSTTEILNATLIHQSITGLYETRIDLSKLGGD

SEQ ID NO: 1200 - protein, 1338 aa, Streptococcus mutans; identical to SEQ ID NO: 1199

SEQ ID NO: 1201 - protein, 1345 aa, Streptococcus mutans
MKKPYSIGLDIGTNSVGWAVVTDDYKVPAKKMKVLGNTDKSHIEKNLLGALLFDSGNTAEDRRLKRTARRRYTRRRNRILYLQEIFSEEMGKVDDSFFHRLEDFFLVTEDKRGERHPIFGNLEEEVKYHENFPTIYHLRQYLADNPEKVDLRLVYLALAHIIKFRGHFLIEGKFDTRNNDVQRLFQEFLAVYDNTFENSSLQEQNVQVEEILTDKISKSAKKDRVLKLFPNEKSNGRFAEFLKLIVGNQADFKKHFELEEKAPLQFSKDTYEEELEVLLAQIGDNYAELFLSAKKLYDSILLSGILTADDSSTKAPLSASMIQRYNEHQMDLAQLKQFIRQKLSDKYNEVFSDVSKDGYAGYIDGKTNQEAFYKYLKGLLNKIEGSGYFLDKIEREDFLRKQRTFDNGSIPHQIHLQEMRAIIRRQSEFYPFLADNQDRIEKILTFRIPYYVGPLARGKSDFAWLSRKSADKITPWNFDEIVDKESSAEAFINRMTNYDLYLPNQKVLPKHSLLYEKFTVYNELTKVKYKTEQGETAFFDANMKQEIFDGVFKVYRKVTKDKLMDFLEKEFDEFRIVDLTGLDKENKAFNASYGTYHDLRKILDKDFLDNSKNEKILEDIVLTLTLFEDREMIRKRLKNYSDLLTKEQLKKLERRHYTGWGRLSAELIHGIRNKESRKTILDYLIDDGNSNRNFMQLINDDALSFKEEIAKAQVIGETDNLNQVVSDIAGSPAIKKGILQSLKIVDELVKIMGHQPENIVVEMARENQFTNQGRRNSQQRLKGLTDSIKEFGSQILKEHPVENSQLQNDRLFLYYLQNGRDMYTGEELDIDYLSQYDIDHIIPQAFIKDNSIDNRVLTSSKENRGKSDDVPSKDVVRKMKPYWSKLLSAKLITQRKFDNLTKAERGGLTDDDKAGFIKRQLVETRQITKHVARILDERFNTETDENNKKIRQVKIVTLKSNLVSNFRKEFELYKVREINDYHHAHDAYLNAVIGKALLGVYPQLEPEFVYGDYPHFHGHEENKATAKKFFYSNIMNFFKKDDVRTDKNGEIIWKKDEHISNIKKVLSYPQVNIVKKVEEQTGGFSKESILPKGNSDKLIPRKTKKFYWDTKKYGGFDSPIVAYSILVIADIEKGKSKKLKTVKALVGVTIMEKMTFERDPVAFLERKGYRNVQEENIIKLPKYSLFKLENGRKRLLASARELQKGNEIVLPNHLGTLLYHAKNIHKVDEPKHLDYVDKHKDEFKELLDVVSNFSKKYTLAEGNLEKIKELYAQNNGEDLKELASSFINLLTFTAIGAPATFKFFDKNIDRKRYTSTTEILNATLIHQSITGLYETRIDLSKLGGD

SEQ ID NO: 1202 - protein, 1345 aa, Streptococcus mutans; identical to SEQ ID NO: 1201

SEQ ID NO: 1203 - protein, 1229 aa, Streptococcus mutans
MKKPYSIGLDIGTNSVGWAVVTDDYKVPAKKMKVLGNTDKSHIEKNLLGALLFDSGNTAEDRRLKRTARRRYTRRRNRILYLQEIFSEEMGKVDDSFFHRLEDSFLVTEDKRGERHPIFGNLEEEVKYHENFPTIYHLRQYLADNPEKVDLRLVYLALAHIIKFRGHFLIEGKFDTRNNDVQRLFQEFLAVYDNTFENSSLQEQNIQVEEILTDKISKSAKKDRVLKLFPNEKSNGRFAEFLKLIVGNQADFKKHFELEEKAPLQFSKDTYEEELEVLLAQIGDNYAELFLSAKKLYDSILLSGILTVTDVGTKAPLSASMIQRYNEHQMDLTQLKQFIRQKLSDKYNEVFSDVSKDGYAGYIDGKTNQEAFYKYLKGLLNKIEGSGYFLDKIEREDFLRKQRTFDNGSIPHQIHLQEMRAIIRRQAEFYPFLADNQDRIEKILTFRIPYYVGPLARGKSDFAWLSRKSADKITPWNFDEIVDKESSAEAFINRMTNYDLYLPNQKVLPKHSLLYEKFTVYNELTKVKYKTEQGKTAFFDANMKQEIFDGVFKVYRKVTKDKLMDFLEKEFDEFRIVDLTGLDKENKVFNASYGTYHDLCKILDKDFLDNSKNEKILEDIVLTLTLFEDREMIRKRLENYSDLLTKEQVKKLERRHYTGWGRLSAELIHGIRNKESRKTILDYLIDDGNSNRNFMQLINDDALSFKEEIAKAQVIGETDNLNQVVSDIAGSPAIKKGILQSLKIVDELVKIMGHQPENIVVEMARENQFTNQGRRNSQQRLKGLTDSIKEFGSQILKEHPVENSQLQNDRLFLYYLQNGRDMYTGEELDIDYLSQYDIDHIIPQAFIKDNSIDNRVLTSSKENRGKSDDVPSKDVVRKMKPYWSKLLSAKLITQRKFDNLTKAERGGLTDDDKAGFIKRQLVETRQITKHVARILDERFNTETDENNKKIRQVKIVTLKSNLVSNFRKEFELYKVREINDYHHAHDAYLNAVIGKALLGVYPQLEPEFVYGDYPHFHGHEENKATAKKFFYSNIMNFFKKDDVRTDKNGEIIWKKDEHISNIKKVLSYPQVNIVKKVEEQTIGQNGGLFDDNPKSPLEVIPSKLVPLKKALNPEKYGGYQKPTTAYPILLIVDTKQLIPISVMDKKRFEQNPVKFLKDKGYQQIEKNNFVKLPKYTLVDIGNGIKRLWASSKEVHKGNQLVVSKKSQDLLYHAHHLDNDYSNEYVKNHY

SEQ ID NO: 1204 - protein, 1229 aa, Streptococcus mutans; identical to SEQ ID NO: 1203

SEQ ID NO: 1205 - protein, 1345 aa, Streptococcus mutans
MKKPYSIGLDIGTNSVGWAVVTDDYKVPAKKMKVLGNTDKSHIEKNLLGALLFDSGNTAEDRRLKRTARRRYTRRRNRILYLQEIFSEEMGKVDDSFFHRLEDSFLVTEDKRGERHPIFGNLEEEVKYHENFPTIYHLRQYLADNPEKVDLRLVYLALAHIIKFRGHFLIEGKFDTRNNDVQRLFQEFLAVYDNTFENSSLQEQNVQVEEILTDKISKSAKKDRVLKLFPNEKSNGRFAEFLKLIVGNQADFKKHFELEEKAPLQFSKDTYEEELEVLLAQIGDNYAELFLSAKKLYDSILLSGILTVTDVGTKAPLSASMIQRYNEHQMDLAQLKQFIRQKLSDKYNEVFSDVSKDGYAGYIDGKTNQEAFYKYLKGLLNKIEGSGYFLDKIEREDFLRKQRTFDNGSIPHQIHLQEMRAIIRRQAEFYPFLADNQDRIEKLLTFRIPYYVGPLARGKSDFAWLSRKSADKITPWNFDEIVDKESSAEAFINRMTNYDLYLPNQKVLPKHSLLYEKFTVYNELIKVKYKTEQGKTAFFDANMKQEIFDGVFKVYRKVTKDKLMDFLEKEFDEFRIVDLTGLDKENKVFNASYGTYHDLCKILDKDFLDNSKNEKILEDIVLTLTLFEDREMIRKRLENYSDLLTKEQVKKLERRHYTGWGRLSAELIHGIRNKESRKTILDYLIDDGNSNRNFMQLINDDALSFKEEIAKAQVIGETDNLNQVVSDIAGSPAIKKGILQSLKIVDELVKIMGHQPENIVVEMARENQFTNQGRRNSQQRLKGLTDSIKEFGSQILKEHPVENSQLQNDRLFLYYLQNGRDMYTGEELDIDYLSQYDIDHIIPQAFIKDNSIDNRVLTSSKENRGKSDDVPSKDVVRKMKSYWSKLLSAKLITQRKFDNLTKAERGGLTDDDKAGFIKRQLVETRQITKHVARILDERFNTETDENNKKIRQVKIVTLKSNLVSNFRKEFELYKVREINDYHHAHDAYLNAVIGKALLGVYPQLEPEFVYGDYPHFHGHKENKATAKKFFYSNIMNFFKKDDVRTDKNGEIIWKKDEHISNIKKVLSYPQVNIVKKVEEQTGGFSKESILPKGNSDKLIPRKTKKFYWDTKKYGGFDSPIVAYSILVIADIEKGKSKKLKTVKALVGVTIMEKMTFERDPVAFLERKGYRNVQEENIIKLPKYSLFKLENGRKRLLASARELQKGNEIVLPNHLGTLLYHAKNIHKVDEPKHLDYVDKHKDEFKELLDVVSNFSKKYTLAEGNLEKIKELYAQNNGEDLKELASSFINLLTFTAIGAPATFKFFDKNIDRKRYTSTTEILNATLIHQSITGLYETRIDLNKLGGD

SEQ ID NO: 1206 - protein, 1350 aa, Streptococcus mutans
MKKPYSIGLDIGTNSVGWAVVTDDYKVPAKKMKVLGNTDKSHIEKNLLGALLFDSGNTAEDRRLKRTARRRYTRRRNRILYLQEIFSEEMGKVDDSFFHRLEDSFLVTEDKRGERHPIFGNLEEEVKYHENFPTIYHLRQYLADNPEKVDLRLVYLALAHIIKFRGHFLIEGKFDTRNNDVQRLFQEFLAVYDNTFENSSLQEQNVQVEEILTDKISKSAKKDRVLKLFPNEKSNGRFAEFLKLIVGNQADFKKHFELEEKAPLQFSKDTYEEELEVLLAQIGDNYAELFLSAKKLYDSILLSGILTVTDVSTKAPLSASMIQRYNEHQMDLTQLKQFIRQKLSDKYNEVFSDVSKDGYAGYIDGKTNQEAFYKYLKGLLNKIEGSGYFLDKIEREDFLRKQRTFDNGSIPHQIHLQEMRAIIRRQAEFYSFLADNQDRIEKILTFRIPYYVGPLARGKSDFAWLSRKSADKITPWNFDEIVDKESSAEAFINRMTNYDLYLPNQKVLPKHSLLYEKFTVYNELTKVKYKTEQGKTAFFDANMKQEIFDGVFKVYRKVTKDKLMDFLEKEFDEFRIVDLTGLDKENKAFNASYGTYHDLRKILDKDFLDNSKNEKILEDIVLTLTLFEDREMIRKRLENYSDLLTKEQVKKLERRHYTGWGRLSAELIHGIRNKESRKTILDYLIDDGNSNRNFMQLINDDALSFKEEIAKAQVIGETDNLNQVVSDIAGSPAIKKGILQSLKIVDELVKIMGHQPENIVVEMARENQFTNQGRRNSQQRLKGLTDSIKEFGSQILKEHPVENSQLQNDRLFLYYLQNGRDMYTGEELDIDYLSQYDIDHIIPQAFIKDNSIDNRVLTSSKENRGKSDDVPSEDVVNRMRPFWNKLLSSGLISQRKYNNLTKKELTLDDKAGFIKRQLVETRQITKHVARMLDERFNKEFDDNNKRIRKVKIVTLKSNLVSSFRKEFELYKVREINDYHHAHDAYLNAVVVKALLVKYSKLEPEFVYGEYPKYNSYRERKTATQKMFFYSNIMNMFKSKVKLADDQIVERPMIEVNDETGEIAWDKTKHITTVKKVLSYPQVNIVKKVEEQTIGQNGGLFDDNPKSPLEVIPSKLVPLKKALNPEKYGGYQKPTTAYPILLIVDTKQLIPISVMDKKRFEQNPVKFLKDKGYQQIEKNNFVKLPKYTLVDIGNGIKRLWASSKEVHKGNQLVVSKKSQDLLYHAHHLDNDYSNEYVKNHYQQFDILFNEITSFSKKCKLGKEHIQKIEEAYSKERDSASIEELADGFIKLLGFTQLGATSPFSFLGIKLNQKQYTGKKDYLLPCMEATLIHQSITGLYETRIDLSKLGGD

SEQ ID NO: 1207 - protein, 1350 aa, Streptococcus mutans
MKKPYSIGLDIGTNSVGWAVVTDDYKVPAKKMKVLGNTDKSHIEKNLLGALLFDSGNTAEDRRLKRTARRRYTRRRNRILYLQEIFSEEMGKVDDSFFHRLEDSFLVTEDKRGERHPIFGNLEEEVKYHENFPTIYHLRQYLADNPEKVDLRLVYLALAHIIKFRGHFLIEGKFDTRNNDVQRLFQEFLAVYDNTFENSSLQEQNVQVEEILTDKISKSAKKDRVLKLFPNEKSNGRFAEFLKLIVGNQADFKKHFELEEKAPLQFSKDTYEEELEVLLAQIGDNYAELFLSAKKLYDSILLSGILTVTDVSTKAPLSASMIQRYNEHQMDLTQLKQFIRQKLSDKYNEVFSDVSKDGYAGYIDGKTNQEAFYKYLKGLLNKIEGSGYFLDKIEREDFLRKQRTFDNGSIPHQIHLQEMRAIIRRQAEFYPFLADNQDRIEKILTFRIPYYVGPLARGKSDFAWLSRKSADKITPWNFDEIVDKESSAEAFINRMTNYDLYLPNQKVLPKHSLLYEKFTVYNELTKVKYKTEQGKTAFFDANMKQEIFDGVFKVYRKVTKDKLMDFLEKEFDEFRIVDLTGLDKENKAFNASYGTYHDLRKILDKDFLDNSKNEKILEDIVLTLTLFEDREMIRKRLKNYSDLLTKEQLKKLERRHYTGWGRLSAELIHGIRNKESRKTILDYLIDDGNSNRNFMQLINDDALSFKEEIAKAQVIGETDNLNQVVSDIAGSPAIKKGILQSLKIVDELVKIMGHQPENIVVEMARENQFTNQGRQNSQQRLKGLTDSIKEFGSQILKEHPVENSQLQNDRLFLYYLQNGRDMYTGEELDIDYLSQYDIDHIIPQAFIKDNSIDNRVLTSSKENRGKSDDVPSEDVVNRMRPFWNKLLSSGLISQRKYNNLTKKELTLDDKAGFIKRQLVETRQITKHVARMLDERFNKEFDDNNKRICKVKIVTLKSNLVSSFRKEFELYKVREINDYHHAHDAYLNAVVVKALLVKYSKLEPEFVYGEYPKYNSYRERKTATQKMFFYSNIMNMFKSKVKLADDQIVERPMIEVNDETGEIAWDKTKHITTVKKVLSYPQVNIVKKVEEQTIGQNGGLFDDNPKSPLEVIPSKLVPLKKALNPEKYGGYQKPTTAYPILLIVDTKQLIPISVMDKKRFEQNPVKFLKDKGYQQIEKNNFVKLPKYTLVDIGNGIKRLWASSKEVHKGNQLVVSKKSQDLLYHAHHLDNDYSNEYVKNHYQQFDILFNEITSFSKKCKLGKEHIQKIEEAYSKERDSASIEELADGFIKLLGFTQLGATSPFSFLGIKLNQKQYTGKKDYLLPCMEATLIHQSITGLYETRIDLSKLGGD

SEQ ID NO: 1208 - protein, 1345 aa, Streptococcus mutans; identical to SEQ ID NO: 1205

SEQ ID NO: 1209 - protein, 1350 aa, Streptococcus mutans; identical to SEQ ID NO: 1206

SEQ ID NO: 1210 - protein, 1350 aa, Streptococcus mutans; identical to SEQ ID NO: 1207

SEQ ID NO: 1211 - protein, 1345 aa, Streptococcus mutans
MKKPYSIGLDIGTNSVGWAVVTDDYKVPAKKMKVLGNTDKSHIKKNLLGALLFDSGNTAADRRLKRTARRRYTRRRNRILYLQEIFAEEMSKVDDSFFHRLEDSFLVTEDKRGERHPIFGNLEEEVKYHENFPTIYHLRQYLADNPEKVDLRLVYLALAHIIKFRGHFLIEGKFDTRNNDVQRLFQEFLAVYDNTFENSSLQEQNVQVEEILTDKISKSAKKDRVLKLFPNEKSNGRFAEFLKLIVGNQADFKKHFELEEKAPLQFSKDTYEEELEVLLTQIGDNYAELFLSAKKLYDSILLSGILTVTDVSTKAPLSASMIQRYNEHQMDLAQLKQFIRQKLSDKYNEVFSDVSKDGYAGYIDGKTNQEAFYKYLKGLLNKIEGSGYFLDKIEREDFLRKQRTFDNGSIPHQIHLQEMRAIIRRQAEFYPFLADNQDRIEKILTFRIPYYVGPLARGKSDFAWLSRKSADKITPWNFDEIVDKESSAEAFINRMTNYDLYLPNQKVLPKHSLLYEKFTVYNELTKVKYKTEQGKTAFFDANMKQEIFDGVFKVYRKVTKDKLMDFLEKEFDEFRIVDLTGLDKENKAFNASYGTYHDLRKILDKDFLDNSKNEKILEDIVLTLTLFEDREMIRKRLENYSDLLTKEQVKKLERRHYTGWGRLSAELIHGIRNKESRKTLLDYLIDDGNSNRNFMQLINDDALSFKEEIAKAQVIGETDNLNQVVSDIAGSPAIKKGILQSLKIVDELVKIMGHQPENIVVEMARENQFTNQGRRNSQQRLKGLTDSIKEFGSQILKEHPVENSQLQNDRLFLYYLQNGRDMYTGEELDIDYLSQYDIDHIIPQAFIKDNSIDNRVLTSSKENRGKSDDVPSKDVVRKMKPYWSKLLSAKLITQRKFDNLTKAERGGLTDDDKAGFIKRQLVETRQITKHVARILDERFNTETDENNKKIRQVKIVTLKSNLVSNFRKEFELYKVREINDYHHAHDAYLNAVIGKALLGVYPQLEPEFVYGDYPHFHGHEENKATAKKFFYSNIMNFFKKDDVRTDKNGEIIWKKDEHISNIKKVLSYPQVNIVKKVEEQTGGFSKESILPKGNSDKLIPRKTKKFYWDTKKYGGFDSPIVAYSILVIADIEKGKSKKLKTVKALVGVTIMEKMTFERDPVAFLERKGYRNVQEENIIKLPKYSLFKLENGRKRLLASARELQKGNEIVLPNHLGTLLYHAKNIHKVDEPKHLDYVDKHKDEFKELLDVVSNFSKKYTLAEGNLEKIKELYAQNNGEDLKELSSSFINLLTFTAIGAPAAFKFFDKNIDRKRYTSTTEILNATLIHQSITGLYETRIDLSKLGGD

SEQ ID NO: 1212 - protein, 1345 aa, Streptococcus mutans
MKKPYSIGLDIGTNSVGWAVVTDDYKVPAKKMKVLGNTDKSHIKKNLLGALLFDSGNTAADRRLKRTARRRYTRRRNRILYLQEIFAEEMSKVDDSFFHRLEDSFLVTEDKRGERHPIFGNLEEEVKYHENFPTIYHLRQYLADNPEKVDLRLVYLALAHIIKFRGHFLIEGKFDTRNNDVQRLFQEFLAVYDNTFENSSLQEQNVQVEEILTDKISKSAKKDRVLKLFPNEKSNGRFAEFLKLIVGNQADFKKHFELEEKAPLQFSKDTYEEELEVLLAQIGDNYAELFLSAKKLYDSILLSGILTVTDVSTKAPLSASMIQRYNEHQMDLAQLKQFIRQKLSDKYNEVFSDVSKDGYAGYIDGKTNQEAFYKYLKGLLNKIEGSGYFLDKIEREDFLRKQRTFDNGSIPHQIHLQEMRAIIRRQAEFYPFLADNQDRIEKILTFRIPYYVGPLARGKSDFAWLSRKSADKITPWNFDEIVDKESSAEAFINRMTNYDLYLPNQKVLPKHSLLYEKFTVYNELTKVKYKTEQGKTAFFDANMKQEIFDGVFKVYRKVTKDKLMDFLEKEFDEFRIVDLTGLDKENKAFNASYGTYHDLRKILDKDFLDNSKNEKILEDIVLTLTLFEDREMIRKRLENYSDLLTKEQVKKLERRHYTGWGRLSAELIHGIRNKESRKTILDYLIDDGNSNRNFMQLINDDALSFKEEIAKAQVIGETDNLNQVVSDIAGSPAIKKGILQSLKIVDELVKIMGHQPENIVVEMARENQFTNQGRRNSQQRLKGLTDSIKEFGSQILKEHPVEHSQLQNDRLFLYYLQNGRDMYTGEELDIDYLSQYDIDHIIPQAFIKDNSIDNRVLTSSKENRGKSDDVPSKNVVRKMKSYWSKLLSAKLITQRKFDNLTKAERGGLTDDDKAGFIKRQLVETRQITKHVARILDERFHTETDENNKKIRQVKIVTLKSNLVSNFRKEFELYKVREINDYHHAHDAYLNAVIGKALLGVYPQLEPEFVYGDYPHFHGHKENKATAKKFFYSNIMNFFKKDDVRTDKNGEIIWKKDEHISNIKKVLSYPQVNIVKKVEEQTGGFSKESILPKGNSDKLIPRKTKKFYWDTKKYGGFDSPIVAYSILVIADIEKGKSKKLKTVKALVGVTIMEKMTFERDPVAFLERKGYRNVQEENIIKLPKYSLFKLENGRKRLLASARELQKGNEIVLPNHLGTLLYHAKNIHKVDEPKHLDYVDKHKDEFKELLDVVSNFSKKYTLAEGNLEKIKELYAQNNGEDLKELASSFINLLTFTAIGAPATFKFFDKNIDRKRYTSTTEILNATLIHQSITGLYETRIDLSKLGGD

SEQ ID NO: 1213 - protein, 1345 aa, Streptococcus mutans
MKKPYSIGLDIGTNSVGWAVVTDDYKVPAKKMKVLGNTDKSHIKKNLLGALLFDSGNTAADRRLKRTARRRYTRRRNRILYLQEIFAEEMSKVDDSFFHRLEDSFLVTEDKRGERHPIFGNLEEEVKYHENFPTIYHLRQYLADNPEKVDLRLVYLALAHIIKFRGHFLIEGKFDTRNNDVQRLFQEFLAVYDNTFENSSLQEQNVQVEEILTDKISKSAKKDRVLKLFPNEKSNGRFAEFLKLIVGNQADFKKHFELEEKAPLQFSKDTYEEELEVLLAQIGDNYAELFLSAKKLYDSILLSGILTVTDVSTKAPLSASMIQRYNEHQMDLAQLKQFIRQKLSDKYNEVFSDVSKDGYAGYIDGKTNQEAFYKYLKGLLNKIEGSGYFLDKIEREDFLRKQRTFDNGSIPHQIHLQEMRAIIRRQAEFYPFLADNQDRIEKILTFRIPYYVGPLARGKSDFAWLSRKSADKITPWNFDEIVDKESSAEAFINRMTNYDLYLPNQKVLPKHSLLYEKFTVYNELTKVKYKTEQGKTAFFDANMKQEIFDGVFKVYRKVTKDKLMDFLEKEFDEFRIVDLTGLDKENKVFNASYGTYHDLCKILDKDFLDNSKNEKILEDIVLTLTLFEDREMIRKRLENYSDLLTKEQVKKLERRHYTGWGRLSAELIHGIRNKESRKTILDYLIDDGNSNRNFMQLINDDALSFKEEIAKAQVIGETDNLNQVVSDIAGSPAIKKGILQSLKIVDELVKIMGHQPENIVVEMARENQFTKQGRRNSQQRLKGLTDSIKEFGSQILKEHPVENSQLQNDRLFLYYLQNGRDMYTGEELDIDYLSQYDIDHIIPQAFIKDNSIDNRVLTSSKENRGKSDDVPSKDVVRKMKSYWSKLLSAKLITQRKFDNLTKAERGGLTDDDKAGFIKRQLVETRQITKHVARILDERFYTETDENNKKIRQVKIVTLKSNLVSNFRKEFELYKVREINDYHHAHDAYLNAVIGKALLGVYPQLEPEFVYGDYPHFHGHKENKATAKKFFYSNIMNFFKKDDVRTDKNGEIIWKKDEHISNIKKVLSYPQVNIVKKVEEQTGGFSKESILPKGNSDKLIPRKTKKFYWDTKKYGGFDSPIVAYSILVIADIEKGKSKKLKTVKALVGVTIMEKMTFERDPVAFLERKGYRNVQEENIIKLPKYSLFKLENGRKRLLASARELQKGNEIVLPNHLGTLLYHAKNIHKVDEPKHLDYVDKHKDEFKELLDVVSNFSKKYTLAEGNLEKIKELYAQNNGEDLKELASSFINLLTFTAIGAPATFKFFDKNIDRKRYTSTTEILNATLIHQSITGLYETRIDLSKLGGD

SEQ ID NO: 1214 - protein, 1345 aa, Streptococcus mutans
MKKPYSIGLDIGTNSVGWAVVTDDYKVPAKKMKVLGNTDKSHIKKNLLGALLFDSGNTAADRRLKRTARRRYTRRRNRILYLQEIFAEEMSKVDDSFFHRLEDSFLVTEDKRGERHPIFGNLEEEVKYHENFPTIYHLRQYLADNPEKVDLRLVYLALAHIIKFRGHFLIEGKFDTRNNDVQRLFQEFLAVYDNTFENSSLQEQNVQVEEILTDKISKSAKKDRVLKLFPNEKSNGRFAEFLKLIVGNQADFKKHFELEEKAPLQFSKDTYEEELEVLLAQIGDNYAELFLSAKKLYDSILLSGILTVTDVSTKAPLSASMIQRYNEHQMDLAQLKQFIRQKLSDKYNEVFSDVSKDGYAGYIDGKTNQEAFYKYLKGLLNKIEGSGYFLDKIEREDFLRKQRTFDNGSIPHQIHLQEMRAIIRRQAEFYPFLADNQDRIEKILTFRIPYYVGPLARGKSDFAWLSRKSADKITPWNFDEIVDKESSAEAFINRMTNYDLYLPNQKVLPKHSLLYEKFTVYNELTKVKYKTEQGKTAFFDANMKQEIFDGVFKVYRKVTKDKLMDFLEKEFDEFRIVDLTGLDKENKAFNASYGTYHDLRKILDKDFLDNSKNEKILEDIVLTLTLFEDREMIRKRLENYSDLLTKEQVKKLERRHYTGWGRLSAELIHGIRNKESRKTILDYLIDDGNSNRNFMQLINDDALSFKEEIAKAQVIGETDNLNQVVSDIAGSPAIKKGILQSLKIVDELVKIMGHQPENIVVEMARENQFTNQGRRNSQQRLKGLTDSIKEFGSQILKEHPVENSQLQNDRLFLYYLQNGRDMYTGEELDIDYLSQYDIDHIIPQAFIKDNSIDNRVLTSSKENRGKSDDVPSKNVVRKMKSYWSKLLSAKLITQRKFDNLTKAERGGLTDDDKAGFIKRQLVETRQITKHVARILDERFHTETDENNKKIRQVKIVTLKSNLVSNFRKEFELYKVREINDYHHAHDAYLNAVIGKALLGVYPQLEPEFVYGDYPHFHGHKENKATAKKFFYSNIMNFFKKDDVRTDKNGEIIWKKDEHISNIKKVLSYPQVNIVKKVEEQTGGFSKESILPKGNSDKLIPRKTKKFYWDTKKYGGFDSPIVAYSILVIADIEKGKSKKLKTVKALVGVTIMEKMTFERDPVAFLERKGYRNVQEENIIKLPKYSLFKLENGRKRLLASARELQKGNEIVLPNHLGTLLYHAKNIHKVDEPKHLDYVDKHKDEFKELLDVVSNFSKKYTLAEGNLEKIKELYAQNNGEDLKELSSSFINLLTFTAIGAPAAFKFFDKNIDRKRYTSTTEILNATLIHQSITGLYETRIDLSKLGGD

SEQ ID NO: 1215 - protein, 1345 aa, Streptococcus mutans; identical to SEQ ID NO: 1211

SEQ ID NO: 1216 - protein, 1345 aa, Streptococcus mutans; identical to SEQ ID NO: 1212

SEQ ID NO: 1217 - protein, 1345 aa, Streptococcus mutans; identical to SEQ ID NO: 1213

SEQ ID NO: 1218 - protein, 1345 aa, Streptococcus mutans; identical to SEQ ID NO: 1214

SEQ ID NO: 1219 - protein, 1345 aa, Streptococcus mutans; identical to SEQ ID NO: 1212

SEQ ID NO: 1220 - protein, 1345 aa, Streptococcus mutans; identical to SEQ ID NO: 1212

SEQ ID NO: 1221 - protein, 1345 aa, Streptococcus mutans; identical to SEQ ID NO: 1212

SEQ ID NO: 1222 - protein, 1345 aa, Streptococcus mutans; identical to SEQ ID NO: 1212

SEQ ID NO: 1223 - protein, 1359 aa, Streptococcus mutans
MKKPYSIGLDIGTNSVGWAVVTDDYKVPAKKMKVLGNTDKSHIKKNLLGALLFDSGNTAEDRRLKRTARRRYTRRRNRILYLQEIFAEEMMQVDESFFQRLDDSFLVEEDKRGSRYPIFGTLKEEKKYHKEFKTIYHLREKLANSTEKADLRLVYLSLAHMIKFRGHFLIEGQLKAENTNVQALFKDFVEVYDKTVEESHLSEMTVDALSILTEKVSKSRRLENLVECYPTEKKNTLFGNLIALSLGLQPNFKTNFQLSEDAKLQFSKDTYEEDLEGLLGEIGDEYADLFASAKNLYDAILLSGILAVDDNTTKAPLSASMVKRYKEHKEELAAFKRFIKEKLPKKYEEIFKDDTKNGYAGYVGADKKLRKRSGKLATEEEFYKYVKGILNKVEGADVWLDKIDREDFLRKQRTFDNGSIPHQIHLQEMHAILRRQGEHYPFLKENQDKIEKILTFRIPYYVGPLVRKGSRFAWAEYKADEKITPWNFDDILDKEKSAEKFITRMTLNDLYLPEEKVLPKHSLLYETFTVYNELTKVKYVNEQGEAKFFDANMKQEIFDHVFKENRKVTKDKLLNYLNKEFEEFRIVNLTGLDKENKVFNSSLGTYHDLRKILNKSFLDNKENEQIIEDIIQTLTLFEDREMIRQRLQKYSDIFTKAQLKKLERRHYTGWGRLSYKLINGIRDKQSNKTILGYLIDDGYSNRNFMQLINDDALSFKEEIAKAQVIGEMDGLNQVVSDIAGSPAIKKGILQSLKIVDELVKVMGHNPANIVIEMARENQTTAKGRRSSQKRYKRLEEAIKNLDHDLNHKILKEHPTDNQALQNDRLFLYYLQNGRDMYTEDPLDINRLSDYDIDHIIPQAFIKDNSIDNRVLTRSDKNRGKSDDVPSEEVVHKMKPFWSKLLSAKLITQRKFDNLTKAERGGLTDDDKAGFIKRQLVETRQITKHVARILDERFNTETDENNKKIRQVKIVTLKSNLVSNFRKEFELYKVREINDYHHAHDAYLNAVIGKALLGVYPQLEPEFVYGDYPHFHGHKENKATAKKFFYSNIMNFFKKGDVRTDKNGEIIWKKDEHISNIKKVLSYPQVNIVKKVEEQTGGFSKESILPKGNSDKLIPRKTKKFYWDTKKYGGFDSPIVAYSILVIADIEKGKSKKLKTVKALVGVTIMEKMTFERDPVAFLERKGYRNVQEENIIKLPKYSLFKLENGRKRLLASARELQKGNEIVLPNHLETLLYHAKNIHKVDEPKHLDYVDKHKDEFKELLDVVSNFSKKYTLAEGNLEKIKELYAQNNGEDLKELASSFINLLTFTAIGAPAAFKFFDKNIDRKRYTSTTEILNATLIHQSITGLYETRIDLNKLGGD

SEQ ID NO: 1224 - protein, 1359 aa, Streptococcus mutans; identical to SEQ ID NO: 1223

SEQ ID NO: 1225 - protein, 1355 aa, Streptococcus mutans
MKKPYSIGLDIGTNSVGWAVVTDDYKVPAKKMKVLGNTDKSHIKKNLLGALLFDSGNTAEDRRLKRTARRRYTRRRNRILYLQEIFAEEMSKVDDSFFHRLDESFLTDDDKNFDSHPIFGNKAEEDAYHQKFPTIYHLRKHLADSTEKADLRLVYLALAHMIKFRGHFLIEGELNAENTDVQKLFADFVGVYDRTFDDSHLSEITVDASSILTEKISKSRRLEKLINNYPKEKKNTLFGNLIALSLGLQPNFKTNFKLSEDAKLQFSKDTYEEDLEELLGKIGDDYADLFTLAKNLYDAILLSGILTADDSSTKAPLSASMIKRYAEHHEDLEKLKEFIKANKPELYHDIFKDETKNGYAGYIENGVKQDEFYKYLKNTLSKITGSDYFLDQIEREDFLRKQRTFDNGSIPHQIHLQEMHAILRRQGDYYPFLKENQDRIEKILTFRIPYYVGPLARKNSRFAWAEYHSDEAVTPWNFDQVIDKESSAQAFIEHMTNNDLYLPNEKVLPKHSPLYEKYTVYNELTKIKYVTEIGEAKFFDANLKQEIFDGLFKHERKVTKKKLRTFLDKNFDEFRIVDIQGLDKETETFNASYATYQDLLKVIKDKVFMDNPENAEILENIVLTLTLFEDREMIKQRLAKYADVFDKKVIDQLARRHYTGWGRLSAKLLNGIRDKQSCKTIMDYLIDDAQSNRNLMQLITDDNLTFKDDIVKAQYVDNSDDLHQVVQSLAGSPAIKKGILQSLKIVDELVKVMGKEPEQIVVEMARENQTTAKGRRNSQQRYKRLKEAIKSLDRDLNHKILKEHPTDNQALQNNRLFLYYLQNGRDMYTGESLDINRLSDYDIDHVIPQAFIKDNSIDNRVLTSSKANRGKSDDVPSEDVVNRMRPFWNKLLSSGLISQRKYNNLTKKELTLDDKAGFIKRQLVETRQITKHVARMLDERFNKEFDDNNKRIRRVKIVTLKSNLVSSFRKEFELYKVREINDYHHAHDAYLNAVVVKALLVKYPKLEPEFVYGEYPKYNSYRERKTATQKMFFYSNIMNMFKSKVKLADDQIVERPMIEVNDETGEIAWDKTKHITTVKKVLSYPQVNIVKKVEEQTIGQNGGLFDDNPKSPLEVIPSKLVPLKKALNPEKYGGYQKPTTAYPILLIVDTKQLIPISVMDKKRFEQNPVKFLKDKGYQQIEKNNFVKLPKYTLVDIGNGIKRLWASSKEVHKGNQLVVSKKSQDLLYHAHHLDNDYSNEYVKNHYQQFDILFNEITSFSKKCKLGKEHIQKIEEAYSKERDFASIEELADGFIKLLGFTQLGATSPFSFLGIKLNQKQYTGKKDYLLPCMEATLIHQSITGLYETRIDLSKLGGD

SEQ ID NO: 1226 - protein, 1355 aa, Streptococcus mutans; identical to SEQ ID NO: 1225

SEQ ID NO: 1227 - protein, 1345 aa, Streptococcus mutans
MKKPYSIGLDIGTNSVGWAVVTDDYKVPAKKMKVLGNTDKSHIKKNLLGALLFDSGNTAEDRRLKRTARRRYTRRRNRILYLQEIFSEEMDKVDDSFFHRLEDSFLVTEDKRGERHPIFGNLEEEVKYHENFPTIYHLRQYLADNPEKVDLRLVYLALAHIIKFRGHFLIEGKFDTRNNDVQRLFQEFLAVYDNTFENSSLQEQNVQVEEILTDKISKSAKKDRVLKLFPNEKSNGRFAEFLKLIVGNQADFKKHFELEEKAPLQFSKDTYEEELEVLLAQIGDNYAELFLSAKKLYDSILLSGILTVTDVSTKAPLSASMIQRYNEHQMDLAQLKQFIRQKLSDKYNEVFSDVSKDGYAGYIDGKTNQEAFYKYLKGLLNKIEGSGYFLDKIEREDFLRKQRTFDNGSIPHQIHLQEMRAIIRRQAEFYPFLADNQDRIEKILTFRIPYYVGPLARGKSDFAWLSRKSADKITPWNFDEIVDKESSAEAFINRMTNYDLYLPNQKVLPKHSLLYEKFTVYNELTKVKYKTEQGKTAFFDANMKQEIFDGVFKVYRKVTKDKLMDFLEKEFDEFRIVDLTGLDKENKVFNASYGTYHDLCKILDKDFLDNSKNEKILEDIVLTLTLFEDREMIRKRLENYSDLLTKEQVKKLERRHYTGWGRLSAELIHGIRNKESRKTILDYLIDDGNSNRNFMQLINDDALSFKEEIAKAQVIGETDNLNQVVSDIAGSPAIKKGILQSLKIVDELVKIMGHQPENIVVEMARENQFTKQGRRNSQQRLKGLTDSIKEFGSQILKEHPVENSQLQNDRLFLYYLQNGRDMYTGEELDIDYLSQYDIDHIIPQAFIKDNSIDNRVLTSSKENRGKSDDVPSKDVVRKMKSYWSKLLSAKLITQRKFDNLTKAERGGLTDDDKAGFIKRQLVETRQITKHVARILDERFYTETDENNKKIRQVKIVTLKSNLVSNFRKEFELYKVREINDYHHAHDAYLNAVIGKALLGVYPQLEPEFVYGDYPHFHGHKENKATAKKFFYSNIMNFFKKDDVRTDKNGEIIWKKDEHISNIKKVLSYPQVNIVKKVEEQTGGFSKESILPKGNSDKLIPRKTKKFYWDTKKYGGFDSPIVAYSILVIADIEKGKSKKLKTVKALVGVTIMEKMTFERDPVAFLERKGYRNVQEENIIKLPKYSLFKLENGRKRLLASARELQKGNEIVLPNHLGTLLYHAKNIHKVDEPKHLDYVDKHKDEFKELLDVVSNFSKKYTLAEGNLEKIKELYAQNNGEDLKELASSFINLLTFTAIGAPATFKFFDKNIDRKRYTSTTEILNATLIHQSITGLYETRIDLSKLGGD

SEQ ID NO: 1228 - protein, 1345 aa, Streptococcus mutans; identical to SEQ ID NO: 1227

SEQ ID NO: 1229 - protein, 1345 aa, Streptococcus mutans
MKKPYSIGLDIGTNSVGWAVVTDDYKVPAKKMKVLGNTDKSHIKKNLLGALLFDSGNTAEDRRLKRTARRRYTRRRNRILYLQEIFSEEMGKVDDSFFHRLDESFLTDDDKNFDSHPIFGNKAEEDAYHQKFPTIYHLRKHLADSTEKADLRLVYLALAHMIKFRGHFLIEGELNAENTDVQKLFADFVGVYDRTFDDSHLSEITVDASSILTEKISKSRRLEKLINNYPKEKKNTLFGNLIALSLGLQPNFKTNFKLSEDAKLQFSKDTYEEELEVLLAQIGDNYAELFLSAKKLYDSILLSGILTVTDVSTKAPLSASMIQRYNEHQMDLAQLKQFIRQKLSDKYNEVFSDVSKDGYAGYIDGKTNQEAFYKYLKGLLNKIEGSGYFLDKIEREDFLRKQRTFDNGSIPHQIHLQEMRAIIRRQAEFYPFLADNQDRIEKILTFRIPYYVGPLARGKSDFAWLSRKSADKITPWNFDEIVDKESSVEAFINRMTNYDLYLPNQKVLPKHSLLYEKFTVYNELTKVKYKTEQGKTAFFDANMKQEIFDGVFKVYRKVTKDKLMDFLEKEFDEFRIVDLTGLDKENKAFNASYGTYHDLRKILDKDFLDNSKNEKILEDIVLTLTLFEDREMIRKRLKNYSDLLTKEQLKKLERRHYTGWGRLSAELIHGIRNKESRKTILDYLIDDGNSNRNFMQLINDDALSFKEEIAKAQVIGETDNLNQVVSDIAGSPAIKKGILQSLKIVDELVKIMGHQPENIVVEMARENQFTNQGRRNSQQRLKGLTDSIKEFGSQILKEHPVENSQLQNDRLFLYYLQNGRDMYTGEELDIDYLSQYDIDHIIPQAFIKDNSIDNRVLTSSKENRGKSDDVPSKDVVRKMKSYWSKLLSAKLITQRKFDNLTKGERGGLTDDDKAGFIKRQLVETRQITKHVARILDERFNTETDENNKKIRQVKIVTLKSNLVSNFRKEFELYKVREINDYHHAHDAYLNAVIGKALLGVYPQLEPEFVYGDYPHFHGHKENKATAKKFFYSNIMNFFKKDDVRTDKNGEIIWKKDEYISNIKKVLSYPQVNIVKKVEEQTGGFSKESILPKGDSDKLIPRKTKKFYWDTKKYGGFDSPIVAYSILVIADIEKGKSKKLKTVKALVGVTIMEKMTFERDPVAFLERKGYRNVQEENIIKLPKYSLFKLENGRKRLLASARELQKGNEIVLPNHLGTLLYHAKNIHKVDEPKHLDYVDKHKDEFKELLDVVSNFSKKYTLAEGNLEKIKELYAQNNGEDLKELASSFINLLTFTAIGAPATFKFFDKNIDRKRYTSTTEILNATLIHQSITGLYETRIDLSKLGGD

SEQ ID NO: 1230 - protein, 1345 aa, Streptococcus mutans
MKKPYSIGLDIGTNSVGWAVVTDDYKVPAKKMKVLGNTDKSHIKKNLLGALLFDSGNTAEDRRLKRTARRRYTRRRNRILYLQEIFSEEMGKVDDSFFHRLDESFLTDDDKNFDSYPIFGNKAEEDAYHQKFPTIYHLRKHLADSTEKADLRLVYLALAHMIKFRGHFLIEGELNAENTDVQKLFADFVGVYDRTFDDSHLSEITVDASSILTEKISKSRRLEKLINNYPKEKKNTLFRNLVALSLGLQPNFKTNFKLSEDAKLQFSKDTYEEDLEELLGKIGDDYADLFTLAKNLYDAILLSGILTADDSSTKAPLSASMIKRYAEHHEDLEKLKEFIKANKPELYHDIFKDETKNGYAGYIENGVKQDEFYKYLKNTLSKIAGSDYFLDKIEREDFLRKQRTFDNGSIPHQIHLQEMHAILRRQGDYYPFLKENQDRIEKILTFRIPYYVGPLARGKSDFAWLSRKSADKITPWNFDEIVDKESSVEAFINRMTNYDLYLPNQKVLPKHSLLYEKFTVYNELTKVKYKTEQGKTAFFDANMKQEIFDGVFKVYRKVTKDKLMDFLEKEFDEFRIVDLTGLDKENKAFNASYGTYHDLRKILDKDFLDNSKNEKILEDIVLTLTLFEDREMIRKRLKNYSDLLTKEQLKKLERRHYTGWGRLSAELIHGIRNKESRKTILDYLIDDGNSNRNFMQLINDDALSFKEEIAKAQVIGETDNLNQVVSDIAGSPAIKKGILQSLKIVDELVKIMGHQPENIVVEMARENQFTNQGRRNSQQRLKGLTDSIKEFGSQILKEHPVENSQLQNDRLFLYYLQNGRDMYTGEELDIDYLSQYDIDHIIPQAFIKDNSIDNRVLTSSKENRGKSDDVPSKDVVRKMKSYWSKLLSAKLITQRKFDNLTKGERGGLTDDDKAGFIKRQLVETRQITKHVARILDERFNTETDENNKKIRQVKIVTLKSNLVSNFRKEFELYKVREINDYHHAHDAYLNAVIGKALLGVYPQLEPEFVYGDYPHFHGHKENKATAKKFFYSNIMNFFKKDDVRTDKNGEIIWKKDEYISNIKKVLSYPQVNIVKKVEEQTGGFSKESILPKGDSDKLIPRKTKKFYWDTKKYGGFDSPIVAYSILVIADIEKGKSKKLKTVKALVGVTIMEKMTFERDPVAFLERKGYRNVQEENIIKLPKYSLFKLENGRKRLLASARELQKGNEIVLPNHLGTLLYHAKNIHKVDEPKHLDYVDKHKDEFKELLDVVSNFSKKYTLAEGNLEKIKELYAQNNGEDLKELASSFINLLTFTAIGAPATFKFFDKNIDRKRYTSTTEILNATLIHQSITGLYETRIDLSKLGGD

SEQ ID NO: 1231 - protein, 1345 aa, Streptococcus mutans; identical to SEQ ID NO: 1230

SEQ ID NO: 1232 - protein, 1345 aa, Streptococcus mutans
MKKPYSIGLDIGTNSVGWAVVTDDYKVPAKKMKVLGNTDKSHIKKNLLGALLFDSGNTAEDRRLKRTARRRYTRRRNRILYLQEIFSEEMGKVDDSFFHRLEDSFLVTEDKRGERHPIFGNLEEEVKYHENFPTIYHLRQYLADNPEKTDLRLVYLALAHIIKFGGHFLIEGKFDTRNNDVQRLFQEFLAVYDNTFENSSLQEQNVQVEEILTDKISKSAKKDRVLKLFPNEKSNGRFAEFLKLIVGNQADFKKHFELEEKAPLQFSKDIYEEELEVLLAQIGDNYAELFLSAKKLYDSILLSGILTVTDVSTKAPLSASMIQRYNEHQMDLAQLKQFIRQKLSDKYNEVFSDVSKDGYAGYIDGKTNQEAFYKYLKGLLNKIEGSGYFLDKIEREDFLRKQRTFDNGSIPHQIHLQEMRAIIRRQAEFYPFLADNQDRIEKILTFRIPYYVGPLARGKSDFAWLSRKSADKITPWNFDEIVDKESSVEAFINRMTNYDLYLPNQKVLPKHSLLYEKFTVYNELTKVKYKTEQGKTAFFDANMKQEIFDGVFKVYRKVTKDKLMDFLEKEFDEFRIVDLTGLDKENKAFNASYGTYHDLRKILDKDFLDNSKNEKILEDIVLTLTLFEDREMIRKRLKNYSDLLTKEQLKKLERRHYTGWGRLSAELIHGIRNKESRKTILDYLIDDGNSNRNFMQLINDDALSFKEEIAKAQVIGETDNLNQVVSDIAGSPAIKKGILQSLKIVDELVKIMGHQPENIVVEMARENQFTNQGRRNSQQRLKGLTDSIKEFGSQILKEHPVENSQLQNDRLFLYYLQNGRDMYTGEELDIDYLSQYDIDHIIPQAFIKDNSIDNRVLTSSKENRGKSDDVPSKNVVRKMKSYWSKLLSAKLITQRKFDNLTKAERGGLTDDDKAGFIKRQLVETRQITKHVARILDERFHTETDENNKKIRQVKIVTLKSNLVSNFRKEFELYKVREINDYHHAHDAYLNAVIGKALLGVYPQLEPEFVYGDYPHFHGHKENKATAKKFFYSNIMNFFKKDDVRTDKNGEIIWKKDEHISNIKKVLSYPQVNIVKKVEEQTGGFSKESILPKGNSDKLIPRKTKKFYWDTKKYGGFDSPIVAYSILVIADIEKGKSKKLKTVKALVGVTIMEKMTFERDPVAFLERKGYRNVQEENIIKLPKYSLFKLENGRKRLLASARELQKGNEIVLPNHLGTLLYHAKNIHKVDEPKHLDYVDKHKDEFKELLDVVSNFSKKYTLAEGNLEKIKELYAQNNGEDLKELASSFINLLTFTAIGAPATFKFFDKNIDRKRYTSTTEILNATLIHQSITGLYETRIDLSKLGGD

SEQ ID NO: 1233 - protein, 1345 aa, Streptococcus mutans; identical to SEQ ID NO: 1232

SEQ ID NO: 1234 - protein, 1345 aa, Streptococcus mutans
MKKPYSIGLDIGTNSVGWAVVTDDYKVPAKKMKVLGNTDKSHIKKNLLGALLFDSGNTAEDRRLKRTARRRYTRRRNRILYLQEIFSEEMGKVDDSFFHRLEDSFLVTEDKRGERHPIFGNLEEEVKYHENFPTIYHLRQYLADNPEKTDLRLVYLALAHIIKFRGHFLIEGKFDTRNNDVQRLFQEFLAVYDNTFENSSLQEQNVQVEEILTDKISKSAKKDRVLKLFPNEKSNGRFAEFLKLIVGNQADFKKHFELEEKAPLQFSKDIYEEELEVLLAQIGDNYAELFLSAKKLYDSILLSGILTVTDVSTKAPLSASMIQRYNEHQMDLAQLKQFIRQKLSDKYNEVFSDVSKDGYAGYIDGKTNQEAFYKYLKGLLNKIEGSGYFLDKIEREDFLRKQRTFDNGSIPHQIHLQEMRAIIRRQAEFYPFLADNQDRIEKILTFRIPYYVGPLARGKSDFAWLSRKSADKITPWNFDEIVDKESSVEAFINRMTNYDLYLPNQKVLPKHSLLYEKFTVYNELTKVKYKTEQGKTAFFDANMKQEIFDGVFKVYRKVTKDKLMDFLEKEFDEFRIVDLTGLDKENKAFNASYGTYHDLRKILDKDFLDNSKNEKILEDIVLTLTLFEDREMIRKRLKNYSDLLTKEQLKKLERRHYTGWGRLSAELIHGIRNKESRKTILDYLIDDGNSNRNFMQLINDDALSFKEEIAKAQVIGETDNLNQVVSDIAGSPAIKKGILQSLKIVDELVKIMGHQPENIVVEMARENQFTNQGRRNSQQRLKGLTDSIKEFGSQILKEHPVENSQLQNDRLFLYYLQNGRDMYTGEELDIDYLSQYDIDHIIPQAFIKDNSIDNRVLTSSKENRGKSDDVPSKNVVRKMKSYWSKLLSAKLITQRKFDNLTKAERGGLTDDDKAGFIKRQLVETRQITKHVARILDERFHTETDENNKKIRQVKIVTLKSNLVSNFRKEFELYKVREINDYHHAHDAYLNAVIGKALLGVYPQLEPEFVYGDYPHFHGHKENKATAKKFFYSNIMNFFKKDDVRTDKNGEIIWKKDEHISNIKKVLSYPQVNIVKKVEEQTGGFSKESILPKGNSDKLIPRKTKKFYWDTKKYGGFDSPIVAYSILVIADIEKGKSKKLKTVKALVGVTIMEKMTFERDPVAFLERKGYRNVQEENIIKLPKYSLFKLENGRKRLLASARELQKGNEIVLPNHLGTLLYHAKNIHKVDEPKHLDYVDKHKDEFKELLDVVSNFSKKYTLAEGNLEKIKELYAQNNGEDLKELASSFINLLTFTAIGAPATFKFFDKNIDRKRYTSTTEILNATLIHQSITGLYETRIDLSKLGGD

SEQ ID NO: 1235 - protein, 1345 aa, Streptococcus mutans
MKKPYSIGLDIGTNSVGWAVVTDDYKVPAKKMKVLGNTDKSHIKKNLLGALLFDSGNTAEDRRLKRTARRRYTRRRNRILYLQEIFSEEMGKVDDSFFHRLEDSFLVTEDKRGERHPIFGNLEEEVKYHENFPTIYHLRQYLADNPEKTDLRLVYLALAHIIKFRGHFLIEGKFDTRNNDVQRLFQEFLAVYDNTFENSSLQEQNVQVEEILTDKISKSAKKDRVLKLFPNEKSNGRFAEFLKLIVGNQADFKKHFELEEKAPLQFSKDIYEEELEVLLAQIGDNYAELFLSAKKLYDSILLSGILTVTDVSTKAPLSASMIQRYNEHQMDLAQLKQFIRQKLSDKYNEVFSDVSKDGYAGYIDGKTNQEAFYKYLKGLLNKIEGSGYFLDKIEREDFLRKQRTFDNGSIPHQIHLQEMRAIIRRQAEFYPFLADNQDRIEKILTFRIPYYVGPLARGKSDFAWLSRKSADKITPWNFDEIVDKESSVEAFINRMTNYDLYLPNQKVLPKHSLLYEKFTVYNELTKVKYKTEQGKTAFFDANMKQEIFDGVFKVYRKVTKDKLMDFLEKEFDEFRIVDLTGLDKENKAFNASYGTYHDLRKILDKDFLDNSKNEKILEDIVLTLTLFEDREMIRKRLKNYSDLLTKEQLKKLERRHYTGWGRLSAELIHGIRNKESRKTILDYLIDDGNSNRNFMQLINDDALSFKEEIAKAQVIGETDNLNQVVSDIAGSPAIKKGILQSLKIVDELVKIMGHQPENIVVEMARENQFTNQGRRNSQQRLKGLTDSIKEFGSQILKEHPVENSQLQNDRLFLYYLQNGRDMYTGEELDIDYLSQYDIDHIIPQAFIKDNSIDNRVLTSSKENRGKSDDVPSKDVVRKMKSYWSKLLSAKLITQRKFDNLTKAERGGLTDDDKAGFIKRQLVETRQITKHVARILDERFNTETDENNKKIRQVKIVTLKSNLVSNFRKEFELYKVREINDYHHAHDAYLNAVIGKALLGVYPQLEPEFVYGDYPHFHGHKENKATAKKFFYSNIMNFFKKDDVRTDKNGEIIWKKDEHISNIKKVLSYPQVNIVKKVEEQTGGFSKESILPKGNSYKLIPRKTKKFYWDTKKYGGFDSPIVAYSILVIADIEKGKSKKLKTVKALVGVTIMEKMTFERDPVAFLERKGYRNVQEENIIKLPKYSLFKLENGRKRLLASARELQKGNEIVLPNHLGTLLYHAKNIHKVDEPKHLDYVDKHKDEFKELLDVVSNFSKKYTLAEGNLEKIKELYAQNNGEDLKELASSFINLLTFTAIGAPAAFKFFDKNIDRKRYTSTTEILNATLIHQSITGLYETRIDLSKLGGD

SEQ ID NO: 1236 - protein, 1345 aa, Streptococcus mutans
MKKPYSIGLDIGTNSVGWAVVTDDYKVPAKKMKVLGNTDKSHIKKNLLGALLFDSGNTAEDRRLKRTARRRYTRRRNRILYLQEIFSEEMGKVDDSFFHRLEDSFLVTEDKRGERHPIFGNLEEEVKYHENFPTIYHLRQYLADNPEKTDLRLVYLALAHIIKFRGHFLIEGKFDTRNNDVQRLFQEFLAVYDNTFENSSLQEQNVQVEEILTDKISKSAKKDRVLKLFPNEKSNGRFAEFLKLIVGNQADFKKHFELEEKAPLQFSKDIYEEELEVLLAQIGDNYAELFLSAKKLYDSILLSGILTVTDVSTKAPLSASMIQRYNEHQMDLAQLKQFIRQKLSDKYNEVFSDVSKDGYAGYIDGKTNQEAFYKYLKGLLNKIEGSGYFLDKIEREDFLRKQRTFDNGSIPHQIHLQEMRAIIRRQAEFYPFLADNQDRIEKILTFRIPYYVGPLARGKSDFAWLSRKSADKITPWNFDEIVDKESSAEAFINRMTNYDLYLPNQKVLPKHSLLYEKFTVYNELTKVKYKTEQGKTAFFDANMKQEIFDGVFKVYRKVTKDKLMDFLEKEFDEFRIVDLTGLDKENKAFNASYGTYHDLRKILDKDFLDNSKNEKILEDIVLTLTLFEDREMIRKRLKNYSDLLTKEQLKKLERRHYTGWGRLSAELIHGIRNKESRKTILDYLIDDGNSNRNFMQLINDDALSFKEEIAKAQVIGETDNLNQVVSDIAGSLAIKKGILQSLKIVDELVKIMGHQPENIVVEMARENQFTNQGRRNSQQRLKGLTDSIKEFGSQILKEHPVENSQLQNDRLFLYYLQNGRDMYTGEELDIDYLSQYDIDHIIPQAFIKDNSIDNRVLTSSKENRGKSDDVPSKDVVRKMKSYWSKLLSAKLITQRKFDNLTKGERGGLTDDDKAGFIKRQLVETRQITKHVARILDERFNTETDENNKKIRQVKIVTLKSNLVSNFRKEFELYKVREINDYHHAHDAYLNAVIGKALLGVYPQLEPEFVYGDYPHFHGHKENKATAKKFFYSNIMNFFKKDDVRTDKNGEIIWKKDEYISNIKKVLSYPQVNIVKKVEEQTGGFFKESILPKGDSDKLIPRKTKKFYWDTKKYGGFDSPIVAYSILVIADIEKGKSKKLKTVKALVGVTIMEKMTFERDPVAFLERKGYRNVQEENIIKLPKYSLFKLENGRKRLLASARELQKGNEIVLPNHLGTLLYHAKNIHKVDEPKHLDYVDKHKDEFKELLDVVSNFSKKYTLAEGNLEKIKELYAQNNGEDLKELASSFINLLTFTAIGAPATFKFFDKNIDRKRYTSTTEILNATLIHQSITGLYETRIDLSKLGGD

SEQ ID NO: 1237 - protein, 1345 aa, Streptococcus mutans
MKKPYSIGLDIGTNSVGWAVVTDDYKVPAKKMKVLGNTDKSHIKKNLLGALLFDSGNTAEDRRLKRTARRRYTRRRNRILYLQEIFSEEMGKVDDSFFHRLEDSFLVTEDKRGERHPIFGNLEEEVKYHENFPTIYHLRQYLADNPEKTDLRLVYLALAHIIKFRGHFLIEGKFDTRNNDVQRLFQEFLAVYDNTFENSSLQEQNVQVEEILTDKISKSAKKDRVLKLFPNEKSNGRFAEFLKLIVGNQADFKKHFELEEKAPLQFSKDIYEEELEVLLAQIGDNYAELFLSAKKLYDSILLSGILTVTDVSTKAPLSASMIQRYNEHQMDLAQLKQFIRQKLSDKYNEVFSDVSKDGYAGYIDGKTNQEAFYKYLKGLLNKIEGSGYFLDKIEREDFLRKQRTFDNGSIPHQIHLQEMRAIIRRQAEFYPFLADNQDRIEKILTFRIPYYVGPLARGKSDFAWLSRKSADKITPWNFDEIVDKESSVEAFINRMTNYDLYLPNQKVLPKHSLLYEKFTVYNELTKVKYKTEQGKTAFFDANMKQEIFDGVFKVYRKVTKDKLMDFLEKEFDEFRIVDLTGLDKENKAFNASYGTYHDLRKILDKDFLDNSKNEKILEDIVLTLTLFEDREMIRKRLKNYSDLLTKEQLKKLERRHYTGWGRLSAELIHGIRNKESRKTILDYLIDDGNSNRNFMQLINDDALSFKEEIAKAQVIGETDNLNQVVSDIAGSPAIKKGILQSLKIVDELVKIMGHQPENIVVEMARENQFTNQGRRNSQQRLKGLTDSIKEFGSQILKEHPVENSQLQNDRLFLYYLQNGRDMYTGEELDIDYLSQYDIDHIIPQAFIKDNSIDNRVLTSSKENRGKSDDVPSKDVVRKMKSYWSKLLSAKLITQRKFDNLTKAERGGLTDDDKAGFIKRQLVETRQITKHVARILDERFNTETDENNKKIRQVKIVTLKSNLVSNFRKEFELYKVREINDYHHAHDAYLNAVIGKALLGVYPQLEPEFVYGDYPHFHGHKENKATAKKFFYSNIMNFFKKDDVRTDKNGEIIWKKDEHISNIKKVLSYPQVNIVKKVEEQTGGFSKESILPKGNSDKLIPRKTKKFYWDTKKYGGFDSPIVAYSILVIADIEKGKSKKLKTVKALVGVTIMEKMTFERDPVAFLERKGYRNVQEENIIKLPKYSLFKLENGRKRLLASARELQKGNEIVLPNHLGTLLYHAKNIHKVDEPKHLDYVDKHKDEFKELLDVVSNFSKKYTLAEGNLEKIKELYAQNNGEDLKELASSFINLLTFTAIGAPATFKFFDKNIDRKRYTSTTEILNATLIHQSITGLYETRIDLNKLGGD

SEQ ID NO: 1238 - protein, 1345 aa, Streptococcus mutans; identical to SEQ ID NO: 1237

SEQ ID NO: 1239 - protein, 1345 aa, Streptococcus mutans; identical to SEQ ID NO: 1234

SEQ ID NO: 1240 - protein, 1345 aa, Streptococcus mutans; identical to SEQ ID NO: 1235

SEQ ID NO: 1241 - protein, 1345 aa, Streptococcus mutans; identical to SEQ ID NO: 1236

SEQ ID NO: 1242 - protein, 1345 aa, Streptococcus mutans
MKKPYSIGLDIGTNSVGWAVVTDDYKVPAKKMKVLGNTDKSHIKKNLLGALLFDSGNTAEDRRLKRTARRRYTRRRNRILYLQEIFSEEMGKVDDSFFHRLEDSFLVTEDKRGERHPIFGNLEEEVKYHENFPTIYHLRQYLADNPEKVDLRLVYLALAHIIKFRGHFLIEGKFDTRNNDVQKLFQEFLAVYDNTFENSSLQEQNVQVEEILTDKISKSAKKDRVLKLFPNEKSNGRFAEFLKLIVGNQADFKKHFELEEKAPLQLSKDTYEEELEVLLAQIGDNYAELFLSAKKLYDSILLSGILTVTDVSTKAPLSASMIQRYNEHQMDLAQLKQFIRQKLSDKYNEVFSDVSKDGYAGYIDGKTNQEAFYKYLKGLLNKIEGSGYFLDKIEREDFLRKQRTFDNGSIPHQIHLQEMRAIIRRQAEFYPFLADNQDRIEKILTFRIPYYVGPLARGKSDFAWLSRKSADKITPWNFDEIVDKESSVEAFINRMTNYDLYLPNQKVLPKHSLLYEKFTVYNELTKVKYKTEQGKTAFFDANMKQEIFDGVFKVYRKVTKDKLMDFLEKEFDEFRIVDLTGLDKENKAFNASYGTYHDLRKILDKDFLDNSKNEKILEDIVLTLTLFEDREMIRKRLENYSDLLTKEQVKKLERRHYTGWGRLSAELIHGIRNKESRKTLLDYLIDDGNSNRNFMQLINDDALSFKEEIAKAQVIGETDNLNQVVSDIAGSPAIKKGILQSLKIVDELVKIMGHQPENIVVEMARENQFTNQGRRNSQQRLKGLTDSIKEFGSQILKEHPVENSQLQNDRLFLYYLQNGRDMYTGEELDIDYLSQYDIDHIIPQAFIKDNSIDNRVLTSSKENRGKSDDVPSKDVVRKMKSYWSKLLSAKLITQRKFDNLTKAERGGLTDDDKAGFIKRQLVETRQITKHVARILDERFNTETDENNKKIRQVKIVTLKSNLVSNFRKEFELYKVREINDYHHAHDAYLNAVIGKALLGVYPQLEPEFVYGDYPHFHGHKENKATAKKFFYSNIMNFFKKDDVRTDKNGEIIWKKDEYISNIKKVLSYPQVNIVKKVEEQTGGFSKESILPKGNSDKLIPRKTKKFYWDTKKYGGFDSPIVAYSILVIADIEKGKSKKLKTVKALVGVTIMEKMTFERDPIAFLERKGYRNVQEENIIKLPKYSLFKLENGRKRLLASARELQKGNEIVLPNHLGTLLYHAKNIHKVDEPKHLDYVDKHKDEFKELLDVVSNFSKKYTLAEGNLEKIKELYAQNNGEDLKELASSFINLLTFTAIGAPATFKFFDKNIDRKRYTSTTEILNATLIHQSITGLYETRIDLSKLGGD

SEQ ID NO: 1243 - protein, 1345 aa, Streptococcus mutans; identical to SEQ ID NO: 1242

SEQ ID NO: 1244 - protein, 1345 aa, Streptococcus mutans
MKKPYSIGLDIGTNSVGWAVVTDDYKVPAKKMKVLGNTDKSHIKKNLLGALLFDSGNTAEDRRLKRTARRRYTRRRNRILYLQEIFSEEMGKVDDSFFHRLEDSFLVTEDKRGERHPIFGNLEEEVKYHENFPTIYHLRQYLADNPEKVDLRLVYLALAHIIKFRGHFLIEGKFDTRNNDVQRLFQEFLAVYDNTFENSSLQEQNVQVEEILTDKISKSAKKDRVLKLFPNEKSNGRFAEFLKLIVGNQADFKKHFELEEKAPLQFSKDTYEEDLEELLGKIGDDYADLFTLAKNLYDAILLSGILTADDSSTKAPLSASMIQRYNEHQMDLAQLKQFIRQKLSDKYNEVFSDVSKDGYAGYIDGKTNQEAFYKYLKGLLNKIEGSGYFLDKIEREDFLRKQRTFDNGSIPHQIHLQEMRAIIRRQAEFYPFLADNQDRIEKILTFRIPYYVGPLARGKSDFAWLSRKSADKITPWNFDEIVDKESSAEAFINRMTNYDLYLPNQKVLPKHSLLYEKFTVYNELTKVKYKTEQGKTAFFDANMKQEIFDGVFKVYRKVTKDKLMDFLEKEFDEFRIVDLTGLDKENKVFNASYGTYHDLCKILDKDFLDNSKNEKILEDIVLTLTLFEDREMIRKRLENYSDLLTKEQVKKLERRHYTGWGRLSAELIHGIRNKESRKTILDYLIDDGNSNRNFMQLINDDALSFKEEIAKAQVIGETDNLNQVVSDIAGSPAIKKGILQSLKIVDELVKIMGHQPENIVVEMARENQFTNQGRRNSQQRLKGLTDSIKEFGSQILKEHPVENSQLQNDRLFLYYLQNGRDMYTGEELDIDYLSQYDIDHIIPQAFIKDNSIDNRVLTSSKENRGKSDDVPSKDVVRKMKSYWSKLLSAKLITQRKFDNLTKAERGGLTDDDKAGFIKRQLVETRQITKHVARILDERFYTETDENNKKIRQVKIVTLKSNLVSNFRKEFELYKVREINDYHHAHDAYLNAVIGKALLGVYPQLEPEFVYGDYPHFHGHKENKATAKKFFYSNIMNFFKKDDVRTDKNGEIIWKKDEHISNIKKVLSYPQVNIVKKVEEQTGGFSKESILPKGNSDKLIPRKTKKFYWDTKKYGGFDSPIVAYSILVIADIEKGKSKKLKTVKALVGVTIMEKMTFERDPVAFLERKGYRNVQEENIIKLPKYSLFKLENGRKRLLASARELQKGNEIVLPNHLGTLLYHAKNIHKVDEPKHLDYVDKHKDEFKELLDVVSNFSKKYTLAEGNLEKIKELYAQNNGEDLKELASSFINLLTFTAIGAPATFKFFDKNIDRKRYTSTTEILNATLIHQSITGLYETRIDLSKLGGD

SEQ ID NO: 1245 - protein, 1345 aa, Streptococcus mutans
MKKPYSIGLDIGTNSVGWAVVTDDYKVPAKKMKVLGNTDKSHIKKNLLGALLFDSGNTAEDRRLKRTARRRYTRRRNRILYLQEIFSEEMGKVDDSFFHRLEDSFLVTEDKRGERHPIFGNLEEEVKYHENFPTIYHLRQYLADNPEKVDLRLVYLALAHIIKFRGHFLIEGKFDTRNNDVQRLFQEFLAVYDNTFENSSLQEQNVQVEEILTDKISKSAKKDRVLKLFPNEKSNGRFAEFLKLIVGNQADFKKHFELEEKAPLQFSKDTYEEDLEELLGKIGDDYADLFTLAKNLYDAILLSGILTADDSSTKAPLSASMIQRYNEHQMDLAQLKQFIRQKLSDKYNEVFSDVSKDGYAGYIDGKTNQEAFYKYLKGLLNKIEGSGYFLDKIEREDFLRKQRTFDNGSIPHQIHLQEMRAIIRRQAEFYPFLADNQDRIEKILTFRIPYYVGPLARGKSDFAWLSRKSADKITPWNFDEIVDKESSAEAFINRMTNYDLYLPNQKVLPKHSLLYEKFTVYNELTKVKYKTEQGKTAFFDANMKQEIFDGVFKVYRKVTKDKLMDFLEKEFDEFRIVDLTGLDKENKVFNASYGTYHDLCKILDKDFLDNSKNEKILEDIVLTLTLFEDREMIRKRLENYSDLLTKEQVKKLERRHYTGWGRLSAELIHGIRNKESRKTILDYLIDDGNSNRNFMQLINDDALSFKEEIAKAQVIGETDNLNQVVSDIAGSPAIKKGILQSLKIVDELVKIMGHQPENIVVEMARENQFTNQGRRNSQQRLKGLTDSIKEFGSQILKEHPVENSQLQNDRLFLYYLQNGRDMYTGEELDIDYLSQYDIDHIIPQAFIKDNSIDNRVLTSSKENRGKSDDVPSKDVVRKMKPYWSKLLSAKLITQRKFDNLTKAERGGLTDDDKAGFIKRQLVETRQITKHVARILDERFNTETDENNKKIRQVKIVTLKSNLVSNFRKEFELYKVREINDYHHAHDAYLNAVIGKALLGVYPQLEPEFVYGDYPHFHGHEENKATAKKFFYSNIMNFFKKDDVRTDKNGEIIWKKDEHISNIKKVLSYPQVNIVKKVEEQTGGFSKESILPKGNSDKLIPRKTKKFYWDTKKYGGFDSPIVAYSILVIADIEKGKSKKLKTVKALVGVTIMEKMTFERDPVAFLERKGYRNVQEENIIKLPKYSLFKLENGRKRLLASARELQKGNEIVLPNHLGTLLYHAKNIHKVDEPKHLDYVDKHKDEFKELLDVVSNFSKKYTLAEGNLEKIKELYAQNNGEDLKELASSFINLLTFTAIGAPATFKFFDKNIDRKRYTSTTEILNATLIHQSITGLYETRIDLSKLGGD

SEQ ID NO: 1246 - protein, 1345 aa, Streptococcus mutans
MKKPYSIGLDIGTNSVGWAVVTDDYKVPAKKMKVLGNTDKSHIKKNLLGALLFDSGNTAEDRRLKRTARRRYTRRRNRILYLQEIFSEEMGKVDDSFFHRLEDSFLVTEDKRGERHPIFGNLEEEVKYHENFPTIYHLRQYLADNPEKVDLRLVYLALAHIIKFRGHFLIEGKFDTRNNDVQRLFQEFLAVYDNTFENSSLQEQNVQVEEILTDKISKSAKKDRVLKLFPNEKSNGRFAEFLKLIVGNQADFKKHFELEEKAPLQFSKDTYEEELEVLLAQIGDNYAELFLSAKKLYDSILLSGILTVTDVSTKAPLSASMIQRYNEHQMDLAQLKQFIRQKLSDKYNEVFSDVSKDGYAGYIDGKTNQEAFYKYLKGLLNKIEGSGYFLDKIEREDFLRKQRTFDNGSIPHQIHLQEMRAIIRRQAEFYPFLADNQDRIEKILTFRIPYYVGPLARGKSDFAWLSRKSADKITPWNFDEIVDKESSAEAFINRMTNYDLYLPNQKVLPKHSLLYEKFTVYNELTKVKYKTEQGKTAFFDANMKQEIFDGVFKVYRKVTKDKLMDFLEKEFDEFRIVDLTGLDKENKVFNASYGTYHDLCKILDKDFLDNSKNEKILEDIVLTLTLFEDREMIRKRLENYSDLLTKEQVKKLERRHYTGWGRLSAELIHGIRNKESRKTILDYLIDDGNSNRNFMQLINDDALSFKEEIAKAQVIGETDNLNQVVSDIAGSPAIKKGILQSLKIVDELVKIMGHQPENIVVEMARENQFTKQGRRNSQQRLKGLTDSIKEFGSQILKEHPVENSQLQNDRLFLYYLQNGRDMYTGEELDIDYLSQYDIDHIIPQAFIKDNSIDNRVLTSSKENRGKSDDVPSKDVVRKMKSYWSKLLSAKLITQRKFDNLTKAERGGLTDDDKAGFIKRQLVETRQITKHVARILDERFYTETDENNKKIRQVKIVTLKSNLVSNFRKEFELYKVREINDYHHAHDAYLNAVIGKALLGVYPQLEPEFVYGDYPHFHGHKENKATAKKFFYSNIMNFFKKDDVRTDKNGEIIWKKDEHISNIKKVLSYPQVNIVKKVEEQTGGFSKESILPKGNSDKLIPRKTKKFYWDTKKYGGFDSPIVAYSILVIADIEKGKSKKLKTVKALVGVTIMEKMTFERDPVAFLERKGYRNVQEENIIKLPKYSLFKLENGRKRLLASARELQKGNEIVLPNHLGTLLYHAKNIHKVDEPKHLDYVDKHKDEFKELLDVVSNFSKKYTLAEGNLEKIKELYAQNNGEDLKELASSFINLLTFTAIGAPATFKFFDKNIDRKRYTSTTEILNATLIHQSITGLYETRIDLSKLGGD

SEQ ID NO: 1247 - protein, 1345 aa, Streptococcus mutans
MKKPYSIGLDIGTNSVGWAVVTDDYKVPAKKMKVLGNTDKSHIKKNLLGALLFDSGNTAEDRRLKRTARRRYTRRRNRILYLQEIFSEEMGKVDDSFFHRLEDSFLVTEDKRGERHPIFGNLEEEVKYHENFPTIYHLRQYLADNPEKVDLRLVYLALAHIIKFRGHFLIEGKFDTRNNDVQRLFQEFLAVYDNTFENSSLQEQNVQVEEILTDKISKSAKKDRVLKLFPNEKSNGRFAEFLKLIVGNQADFKKHFELEEKAPLQFSKDTYEEELEVLLAQIGDNYAELFLSAKKLYDSILLSGILTVTDVSTKAPLSASMIQRYNEHQMDLAQLKQFIRQKLSDKYNEVFSDVSKDGYAGYIDGKTNQEAFYKYLKGLLNKIEGSGYFLDKIEREDFLRKQRTFDNGSIPHQIHLQEMRAIIRRQAEFYPFLADNQDRIEKILTFRIPYYVGPLARGKSDFAWLSRKSADKITPWNFDEIVDKESSAEAFINRMTNYDLYLPNQKVLPKHSLLYEKFTVYNELTKVKYKTEQGKTAFFDANMKQEIFDGVFKVYRKVTKDKLMDFLEKEFDEFRIVDLTGLDKENKVFNASYGTYHDLCKILDKDFLDNSKNEKILEDIVLTLTLFEDREMIRKRLENYSDLLTKEQVKKLERRHYTGWGRLSAELIHGIRNKESRKTILDYLIDDGNSNRNFMQLINDDALSFKEEIAKAQVIGETDNLNQVVSDIAGSPAIKKGILQSLKIVDELVKIMGHQPENIVVEMARENQFTKQGRRNSQQRLKGLTDSIKEFGSQILKEHPVENSQLQNDRLFLYYLQNGRDMYTGEELDIDYLSQYDIDHIIPQAFIKDNSIDNRVLTSSKENRGKSDDVPSKDVVRKMKSYWSKLLSAKLITQRKFDNLTKAERGGLTDDDKAGFIKRQLVETRQITKHVARILDERFYTETDENNKKIRQVKIVTLKSNLVSNFRKEFELYKVREINDYHHAHDAYLNAVIGKALLGVYPQLEPEFVYGDYPHFHGHKENKATAKKFFYSNIMNFFKKDDVRTDRNGEIIWKKDEHISNIKKVLSYPQVNIVKKVEEQTGGFSKESILPKGNSDKLIPRKTKKFYWDTKKYGGFDSPIVAYSILVIADIEKGKSKKLKTVKALVGVTIMEKMTFERDPVAFLERKGYRNVQEENIIKLPKYSLFKLENGRKRLLASARELQKGNEIVLPNHLGTLLYHAKNIHKVDEPKHLDYVDKHKDEFKELLDVVSNFSKKYTLAEGNLEKIKELYAQNNGEDLKELASSFINLLTFTAIGAPATFKFFDKNIDRKRYTSTTEILNATLIHQSITGLYETRIDLSKLGGD

SEQ ID NO: 1248 - protein, 1345 aa, Streptococcus mutans
MKKPYSIGLDIGTNSVGWAVVTDDYKVPAKKMKVLGNTDKSHIKKNLLGALLFDSGNTAEDRRLKRTARRRYTRRRNRILYLQEIFSEEMGKVDDSFFHRLEDSFLVTEDKRGERHPIFGNLEEEVKYHENFPTIYHLRQYLADNPEKVDLRLVYLALAHIIKFRGHFLIEGKFDTRNNDVQRLFQEFLAVYDNTFENSSLQEQNVQVEEILTDKISKSAKKDRVLKLFPNEKSNGRFAEFLKLIVGNQADFKKHFELEEKAPLQFSKDTYEEELEVLLAQIGDNYAELFLSAKKLYDSILLSGILTVTDVSTKAPLSASMIQRYNEHQMDLAQLKQFIRQKLSDKYNEVFSDVSKDGYAGYIDGKTNQEAFYKYLKGLLNKIEGSGYFLDKIEREDFLRKQRTFDNGSIPHQIHLQEMRAIIRRQAEFYPFLADNQDRIEKILTFRIPYYVGPLARGKSDFAWLSRKSADKITPWNFDEIVDKESSAEAFINRMTNYDLYLPNQKVLPKHSLLYEKFTVYNELTKVKYKTEQGKTAFFDANMKQEIFDGVFKVYRKVTKDKLMDFLEKEFDEFRIVDLTGLDKENKVFNASYGTYHDLCKILDKDFLDNSKNEKILEDIVLTLTLFEDREMIRKRLENYSDLLTKEQVKKLERRHYTGWGRLSAELIHGIRNKESRKTILDYLIDDGNSNRNFMQLINDDALSFKEEIAKAQVIGETDNLNQVVSDIAGSPAIKKGILQSLKIVDELVKIMGHQPENIVVEMARENQFTNQGRQNSQQRLKGLTDSIKEFGSQILKEHPVENSQLQNDRLFLYYLQNGRDMYTGEELDIDYLSQYDIDHIIPQAFIKDNSIDNRVLTSSKENRGKSDDVPSEDVVRKMKSYWSKLLSAKLITQRKFDNLTKAERGGLTDDDKAGFIKRQLVETRQITKHVARILDERFYTETDENNKKIRQVKIVTLKSNLVSNFRKEFELYKVREINDYHHAHDAYLNAVIGKALLGVYPQLEPEFVYGDYPHFHGHKENKATAKKFFYSNIMNFFKKDDVRTDKNGEIIWKKDEHISNIKKVLSYPQVNIVKKVEEQTGGFSKESILPKGNSDKLIPRKTKKFYWDTKKYGGFDSPIVAYSILVIADIEKGKSKKLKTVKALVGVTIMEKMTFERDPVAFLERKGYRNVQEENIIKLPKYSLFKLENGRKRLLASARELQKGNEIVLPNHLGTLLYHAKNIHKVDEPKHLDYVDKHKDEFKELLDVVSNFSKKYTLAEGNLEKIKELYAQNNGEDLKELASSFINLLTFTAIGAPATFKFFDKNIDRKRYTSTTEILNATLIHQSITGLYETRIDLSKLGGD

SEQ ID NO: 1249 - protein, 1345 aa, Streptococcus mutans; identical to SEQ ID NO: 1248

SEQ ID NO: 1250 - protein, 1345 aa, Streptococcus mutans; identical to SEQ ID NO: 1244

SEQ ID NO: 1251 - protein, 1345 aa, Streptococcus mutans; identical to SEQ ID NO: 1245

SEQ ID NO: 1252 - protein, 1345 aa, Streptococcus mutans; identical to SEQ ID NO: 1246

SEQ ID NO: 1253 - protein, 1345 aa, Streptococcus mutans; identical to SEQ ID NO: 1247

SEQ ID NO: 1254 - protein, 1345 aa, Streptococcus mutans; identical to SEQ ID NO: 1246

SEQ ID NO: 1255 - protein, 1345 aa, Streptococcus mutans; identical to SEQ ID NO: 1246

SEQ ID NO: 1256 - protein, 1345 aa, Streptococcus mutans; identical to SEQ ID NO: 1246

SEQ ID NO: 1257 - protein, 1345 aa, Streptococcus mutans; identical to SEQ ID NO: 1247

SEQ ID NO: 1258 - protein, 1345 aa, Streptococcus mutans
MKKPYSIGLDIGTNSVGWAVVTDDYKVPAKKMKVLGNTDKSHIKKNLLGALLFDSGNTAEDRRLKRTARRRYTRRRNRILYLQEIFSEEMGKVNDSFFHRLEDSFLVTEDKRGERHPIFGNLEEEVKYHENFPTIYHLRQYLADNPEKVDLRLVYLALAHIIKFRGHFLIEGKFDTRNNDVQRLFQEFLAVYDNTFENSSLQEQNVQVEEILTDKISKSAKKDRVLKLFPNEKSNGRFAEFLKLIVGNQADFKKHFELEEKAPLQFSKDTYEEELEVLLAQIGDNYAELFLSAKKLYDSILLSGILTVTDVSTKAPLSASMIQRYNEHQMDLAQLKQFIRQKLSDKYNEVFSDVSKDGYAGYIDGKTNQEAFYKYLKGLLNKIEGSGYFLDKIEREDFLRKQRTFDNGSIPHQIHLQEMRAIIRRQAEFYPFLADNQDRIEKILTFRIPYYVGPLARGKSDFAWLSRKSADKITPWNFDEIVDKESSAEAFINRMTNYDLYLPNQKVLPKHSLLYEKFTVYNELTKVKYKTEQGKTAFFDANMKQEIFDGVFKVYRKVTKDKLMDFLEKEFDEFRIVDLTGLDKENKVFNASYGTYHDLCKILDKDFLDNSKNEKILEDIVLTLTLFEDREMIRKRLENYSDLLTKEQVKKLERRHYTGWGRLSAELIHGIRNKESRKTILDYLIDDGNSNRNFMQLINDDALSFKEEIAKAQVIGETDNLNQVVSDIAGSPAIKKGILQSLKIVDELVKIMGHQPENIVVEMARENQFTKQGRRNSQQRLKGLTDSIKEFGSQILKEHPVENSQLQNDRLFLYYLQNGRDMYTGEELDIDYLSQYDIDHIIPQAFIKDNSIDNRVLTSSKENRGKSDDVPSKDVVRKMKSYWSKLLSAKLITQRKFDNLTKAERGGLTDDDKAGFIKRQLVETRQITKHVARILDERFYTETDENNKKIRQVKIVTLKSNLVSNFRKEFELYKVREINDYHHAHDAYLNAVIGKALLGVYPQLEPEFVYGDYPHFHGHKENKATAKKFFYSNIMNFFKKDDVRTDKNGEIIWKKDEYISNIKKVLSYPQVNIVKKVEEQTGGFSKESILPKGNSDKLIPRKTKKFYWDTKKYGGFDSPIVAYSILVIADIEKGKSKKLKTVKALVGVTIMEKMTFERDPIAFLERKGYRNVQEENIIKLPKYSLFKLENGRKRLLASARELQKGNEIVLPNHLGTLLYHAKNIHKVDEPKHLDYVDKHKDEFKELLDVVSNFSKKYTLAEGNLEKIKELYAQNNGEDLKELASSFINLLTFTAIGAPAAFKFFDKNIDRKRYTSTTEILNATLIHQSITGLYETRIDLSKLGGD

SEQ ID NO: 1259 - protein, 1345 aa, Streptococcus mutans; identical to SEQ ID NO: 1258

SEQ ID NO: 1260 - protein, 1345 aa, Streptococcus mutans
MKKPYSIGLDIGTNSVGWAVVTDDYKVPAKKMKVLGNTDKSHIKKNLLGALLFDSGNTAEDRRLKRTTRRRYTRRRNRILYLQEIFSEEMGKVDDSFFHRLEDSFLVTEDKRGERHPIFGNLEEEVKYHENFPTIYHLRQYLADNPEKTDLRLVYLALAHIIKFRGHFLIEGKFDTRNNDVQRLFQEFLAVYDNTFENSSLQEQNVQVEEILTDKISKSAKKDRVLKLFPNEKSNGCFAEFLKLIVGNQADFKKHFELEEKAPLQFSKDTYEEELEVLLAQIGDNYAELFLSAKKLYDSILLSGILTVTDVSTKAPLSASMIQRYNEHQMDLTQLKQFIRQKLSDKYNEVFSDVSKDGYAGYIDGKTNQEAFYKYLKGLLNKIEGSGYFLDKIEREDFLRKQRTFDNGSIPHQIHLQEMRAIIRRQAEFYPFLADNQDRIEKLLTFRIPYYVGPLASGKSDFAWLSRKSADKITPWNFDEIVDKESSAEAFINRMTNYDLYLPNQKVLPKHSLLYEKFTVYNELTKVKYKTEQGKTAFFDANMKQEIFDGVFKVYRKVTKDKLMDFLEKEFDEFRIVDLTGLDKENKVFNASYGTYHDLCKILDKDFLDNSKNEKILEDIVLTLTLFEDREMIRKRLENYSDLLTKEQVKKLERRHYTGWGRLSAELIHGIRNKESRKTILDYLIDDGNSNRNFMQLINDDALSFKEEIAKAQVIGETDNLNQVVSDIAGSPAIKKGILQSLKIVDELVKIMGHQPENIVVEMARENQFTNQGRRNSQQRLKGLTDSIKEFGSQILKEHPVENSQLQNDRLFLYYLQNGRDMYTGEELDIDYLSQYDIDHIIPQAFIKDNSIDNRVLTSSKENRGKSDDVPSKDVVRKMKSYWSKLLSAKLITQRKFDNLTKAERGGLTDDDKAGFIKRQLVETRQITKHVARILDERFNTETDENNKKIRQVKIVTLKSNLVSNFRKEFELYKVREINDYHHAHDAYLNAVIGKALLGVYPQLEPEFVYGDYPHFHGHKENKATAKKFFYSNIMNFFKKDDVRTDKNGEIIWKKDEHISNIKKVLSYPQVNIVKKVEEQTGGFSKESILPKGNSDKLIPRKTKKFYWDTKKYGGFDSPIVAYSILVIADIEKGKSKKLKTVKALVGVTIMEKMTFERDPVAFLERKGYRNVQEENIIKLPKYSLFKLENGRKRLLASARELQKGNEIVLPNHLGTLLYHAKNIHKVDEPKHLDYVDKHKDEFKELLDVVSNFSKKYTLAEGNLEKIKELYAQNNGEDLKELASSFINLLTFTAIGAPATFKFFDKNIDRKRYTSTTEILNATLIHQSITGLYETRIDLSKLGGD

SEQ ID NO: 1261 - protein, 1345 aa, Streptococcus mutans; identical to SEQ ID NO: 1260

SEQ ID NO: 1262 - protein, 1350 aa, Streptococcus mutans
MKKPYSIGLDIGTNSVGWAVVTDDYKVPAKKMTVLGNTDKSHIKKNLLGALLFDSGNTAADRRLKRTARRRYTRRRNRILYLQEIFAEEMSKVDDSFFHRLEDSFLVTEDKRGERHPIFGNLEEEVKYHENFPTIYHLRQYLADNPEKVDLRLVYLALAHIIKFRGHFLIEGKFDTRNNDVQRLFQEFLAVYDNTFENSSLQEQNVQVEEILTDKISKSAKKDRVLKLFPNEKSNGRFAEFLKLIVGNQADFKKHFELEEKTPLQFSKDTYEEELEVLLAQIGDNYAELFLSAKKLYDSILLSGILTVTDVSTKAPLSASMIQRYNEHQMDLAQLKQFIRQKLSDKYNEVFSDVSKDGYAGYIDGKTNQEAFYKYLKGLLNKIEGSGYFLDKIEREDFLRKQRTFDNGSIPHQIHLQEMRAIIRRQAEFYPFLADNQDRIEKILTFRIPYYVGPLARGKSDFAWLSRKSADKITPWNFDEIVDKESSAEAFINRMTNYDLYLPNQKVLPKHSLLYEKFTVYNELTKVKYKTEQGKTAFFDANMKQEIFDGVFKVYRKVTKDKLMDFLEKEFDEFRIVDLTGLDKENKAFNASYGTYHDLRKILDKDFLDNSKNEKILEDIVLTLTLFEDREMIRKRLENYSDLLTKEQVKKLERRHYTGWGRLSAELIHGIRNKESRKTILDYLIDDGNSNRNFMQLINDDALSFKEEIAKAQVIGETDNLNQVVSDIAGSPAIKKGILQSLKIVDELVKIMGHQPENIVVEMARENQFTNQGRRNSQQRLKGLTDSIKEFGSQILKEHPVENSQLQNDRLFLYYLQNGRDMYTGEELDIDYLSQYDIDHIIPQAFIKDNSIDNRVLTSSKENRGKSDDVPSEDVVNRMRPFWNKLLSSGLISQRKYNNLTKKELTPDDKAGFIKRQLVETRQITKHVARMLDERFNKEFDDNNKRIRRVKIVTLKSNLVSSFRKEFELYKVREINDYHHAHDAYLNAVVVKALLVKYPKLEPEFVYGEYPKYNSYRERKTATQKMFFYSNIMNMFKSKVKLADDQIVERPMIEVNDETGEIAWDKTKHITTVKKVLSYPQVNIVKKVEEQTIGQNGGLFDDNPKSPLEVIPSKLVPLKKALNPEKYGGYQKPTTAYPILLIVDTKQLIPISVMDKKRFEQNPVKFLKDKGYQQIEKNNFVKLPKYTLVDIGNGIKRLWASSKEVHKGNQLVVSKKSQDLLYHAHHLDNDYSNEYVKNHYQQFDILFNEITSFSKKCKLGKEHIQKIEEAYSKERDSASIEELADGFIKLLGFTQLGATSPFSFLGIKLNQKQYTGKKDYLLPCMEATLIHQSITGLYETRIDLSKLGGD

SEQ ID NO: 1263 - protein, 1350 aa, Streptococcus mutans; identical to SEQ ID NO: 1262

SEQ ID NO: 1264 - protein, 1345 aa, Streptococcus mutans
MKKPYSIGLDIGTNSVGWAVVTDDYKVPDKKMKVLGNTDKSHIKKNLLGALLFDSGNTAEDRRLKRTARRRYTRRRNRILYLQEIFSEEMGKVDDSFFHRLEDSFLVTEDKRGERHPIFGNLEEEVKYHENFPTIYHLRQYLADNPEKTDLRLVYLALAHIIKFRGHFLIEGKFDTRNNDVQRLFQEFLAVYDNTFENSSLQEQNVQVEEILTDKISKSAKKDRVLKLFPNEKSNGRFAEFLKLIVGNQADFKKHFELEEKAPLQFSKDIYEEELEVLLAQIGDNYAELFLSAKKLYDSILLSGILTVTDVSTKAPLSASMIQRYNEHQMDLAQLKQFIRQKLSDKYNEVFSDVSKDGYAGYIDGKTNQEAFYKYLKGLLNKIEGSGYFLDKIEREDFLRKQRTFDNGSIPHQIHLQEMRAIIRRQAEFYPFLADNQDRIEKILTFRIPYYVGPLARGKSDFAWLSRKSADKITPWNFDEIVDKESSVEAFINRMTNYDLYLPNQKVLPKHSLLYEKFTVYNELTKVKYKTEQGKTAFFDANMKQEIFDGVFKVYRKVTKDKLMDFLEKEFDEFRIVDLTGLDKENKAFNASYGTYHDLRKILDKDFLDNSKNEKILEDIVLTLTLFEDREMIRKRLKNYSDLLTKEQLKKLERRHYTGWGRLSAELIHGIRNKESRKTILDYLIDDGNSNRNFMQLINDDALSFKEEIAKAQVIGETDNLNQVVSDIAGSPAIKKGILQSLKIVDELVKIMGHQPENIVVEMARENQFTNQGRRNSQQRLKGLTDSIKEFGSQILKEHPVENSQLQNDRLFLYYLQNGRDMYTGEELDIDYLSQYDIDHIIPQAFIKDNSIDNRVLTSSKENRGKSDDVPSKDVVRKMKSYWSKLLSAKLITQRKFDNLTKAERGGLTDDDKAGFIKRQLVETRQITKHVARILDERFYTETDENNKKIRQVKIVTLKSNLVSNFRKEFELYKVREINDYHHAHDAYLNAVIGKALLGVYPQLEPEFVYGDYPHFHGHKENKATAKKFFYSNIMNFFKKDDVRTDKNGEIIWKKDEHISNIKKVLSYPQVNIVKKVEEQTGGFSKESILPKGNSDKLIPRKTKKFYWDTKKYGGFDSPIVAYSILVIADIEKGKSKKLKTVKALVGVTIMEKMTFERDPVAFLERKGYRNVQEENIIKLPKYSLFKLENGRKRLLASARELQKGNEIVLPNHLGTLLYHAKNIHKVDEPKHLDYVDKHKDEFKELLDVVSNFSKKYTLAEGNLEKIKELYAQNNGEDLKELASSFINLLTFTAIGAPATFKFFDKNIDRKRYTSTTEILNATLIHQSITGLYETRIDLSKLGGD

SEQ ID NO: 1265 - protein, 1345 aa, Streptococcus mutans
MKKPYSIGLDIGTNSVGWAVVTDDYKVSAKKMKVLGNTDKSHIKKNLLGALLFDSGNTAEDRRLKRTARRRYTRRRNRILYLQEIFAEEMSKVDDSFFHRLEDSFLVTEDKRGERHPIFGNLEEEVKYHENFPTIYHLRQYLADNPEKVDLRLVYLALAHIIKFRGHFLIEGKFDTRNNDVQRLFQEFLAVYDNTFENSSLQEQNVQVEEILTDKISKSAKKDRVLKLFPNEKSNGRFAEFLKLIVGNQADFKKHFELEEKAPLQFSKDTYEEELEVLLAQIGDNYAELFLSAKKLYDSILLSGILTVTDVSTKAPLSASMIQRYNEHQMDLAQLKQFIRQKLSDKYNEVFSDVSKDGYAGYIDGKTNQEAFYKYLKGLLNKIEGSGYFLDKIEREDFLRKQRTFDNGSIPHQIHLQEMRAIIRRQAEFYPFLADNQDRIEKILTFRIPYYVGPLARGKSDFAWLSRKSADKITPWNFDEIVDKESSAEAFINRMTNYDLYLPNQKVLPKHSLLYEKFTVYNELTKVKYKTEQGKTAFFDANMKQEIFDGVFKVYRKVTKDKLMDFLEKEFDEFRIVDLTGLDKENKAFNASYGTYHDLRKILDKDFLDNSKNEKILEDIVLTLTLFEDREMIRKRLENYSDLLTKEQVKKLERRHYTGWGRLSAELIHGIRNKESRKTILDYLIDDGNSNRNFMQLINDDALSFKEEIAKAQVIGETDNLNQVVSDIAGSPAIKKGILQSLKIVDELVKIMGHQPENIVVEMARENQFTNQGRRNSQQRLKGLTDSIKEFGSQILKEHPVEHSQLQNDRLFLYYLQNGRDMYTGEELDIDYLSQYDIDHIIPQAFIKDNSIDNRVLTSSKENRGKSDDVPSKNVVRKMKSYWSKLLSAKLITQRKFDNLTKAERGGLTDDDKAGFIKRQLVETRQITKHVARILDERFHTETDENNKKIRQVKIVTLKSNLVSNFRKEFELYKVREINDYHHTHDAYLNAVIGKALLGVYPQLEPEFVYGDYPHFHGHKENKATAKKFFYSNIMNFFKKDDVRTDKNGEIIWKKDEHISNIKKVLSYPQVNIVKKVEEQTGGFSKESILPKGNSDKLIPRKTKKFYWDTKKYGGFDSPIVAYSILVIADIEKGKSKKLKTVKALVGVTIMEKMTFERDPVAFLERKGYRNVQEENIIKLPKYSLFKLENGRKRLLASARELQKGNEIVLPNHLGTLLYHAKNIHKVDEPKHLDYVDKHKDEFKELLDVVSNFSKKYTLAEGNLEKIKELYAQNNGEDLKELASSFINLLTFTAIGAPATFKFFDKNIDRKRYTSTTEILNATLIHQSITGLYETRIDLSKLGGD

SEQ ID NO: 1266 - protein, 1345 aa, Streptococcus mutans; identical to SEQ ID NO: 1265

SEQ ID NO: 1267 - protein, 1345 aa, Streptococcus mutans
MKKPYSIGLDIGTNSVGWSVVTDDYKVPAKKMKVLGNTDKSHIEKNLLGALLFDSGNTAEDRRLKRTARRRYTRRRNRILYLQEIFSEEMGKVDDSFFHRLEDSFLVTEDKRGERHPIFGNLEEEVKYHENFPTIYHLRQYLADNPEKVDLRLVYLALAHIIKFRGHFLIEGKFDTRNNDVQRLFQEFLAVYDNTFENSSLQEQNVQVEEILTDKISKSAKKDRVLKLFPNEKSNGRFAEFLKLIVGNQADFKKHFELEEKAPLQFSKDTYEEELEVLLAQIGDNYAELFLSAKKLYDSILLSGILTVTDVGTKAPLSASMIQRYNEHQMDLAQLKQFIRQKLSDKYNEVFSDVSKDGYAGYIDGKTNQEAFYKYLKGLLNKIEGSGYFLDKIEREDFLRKQRTFDNGSIPHQIHLQEMRAIIRRQAEFYPFLADNQDRIEKLLTFRIPYYVGPLARGKSDFAWLSRKSADKITPWNFDEIVDKESSAEAFINRMTNYDLYLPNQKVLPKHSLLYEKFTVYNELTKVKYKTEQGKTAFFDANMKQEIFDGVFKVYRKVTKDKLMDFLEKEFDEFRIVDLTGLDKENKVFNASYGTYHDLCKILDKDFLDNSKNEKILEDIVLTLTLFEDREMIRKRLENYSDLLTKEQVKKLERRHYTGWGRLSAELIHGIRNKESRKTILDYLIDDGNSNRNFMQLINDDALSFKEEIAKAQVIGETDNLNQVVSDIAGSPAIKKGILQSLKIVDELVKIMGHQPENIVVEMARENQFTNQGRRNSQQRLKGLTDSIKEFGSQILKEHPVENSQLQNDRLFLYYLQNGRDMYTGEELDIDYLSQYDIDHIIPQAFIKDNSIDNRVLTSSKENRGKSDDVPSKDVVRKMKSYWSKLLSAKLITQRKFDNLTKAERGGLTDDDKAGFIKRQLVETRQITKHVARILDERFNTETDENNKKIRQVKIVTLKSNLVSNFRKEFELYKVREINDYHHAHDAYLNAVIGKALLGVYPQLEPEFVYGDYPHFHGHKENKATAKKFFYSNIMNFFKKDDVRIDKNGEIIWKKDEHISNIKKVLSYPQVNIVKKVEEQTGGFSKESILPKGNSDKLIPRKTKKFYWDTKKYGGFDSPIVAYSILVIADIEKGKSKKLKTVKALVGVTIMEKMTFERDPVAFLERKGYRNVQEENIIKLPKYSLFKLENGRKRLLASARELQKGNEIVLPNHLGTLLYHAKNIHKVDEPKHLDYVDKHKDEFKELLDVVSNFSKKYTLAEGNLEKIKELYAQNNGEDLKELASSFINLLTFTAIGAPATFKFFDKNIDRKRYTSTTEILNATLIHQSITGLYETRIDLSKLGGD

SEQ ID NO: 1268 - protein, 1345 aa, Streptococcus mutans; identical to SEQ ID NO: 1267

SEQ ID NO: 1269 - protein, 1355 aa, Streptococcus mutans
MKKSYSIGLDIGTNSVGWAVVTDDYKVPAKKMKVLGNTDKSHIKKNLLGALLFDSGNTAEDRRLKRTARRRYTRRRNRILYLQEIFSEEMGKVDDSFFHRLDESFLTDDDKNFDSHPIFGNKAEEDAYHQKFPTIYHLRKHLADSTEKADLRLVYLALAHMIKFRGHFLIEGELNAENTDVQKLFADFVGVYDRTFDDSHLSEITVDASSILTEKISKSRRLEKLINNYPKEKKNTLFGNLIALSLGLQPNFKTNFKLSEDAKLQFSKDTYEEDLEELLGKIGDDYADLFTLAKNLYDAILLSGILTADDSSTKAPLSASMIKRYAEHHEDLEKLKEFIKANKPELYHDIFKDETKNGYAGYIENGVKQDEFYKYLKNTLSKIAGSDYFLDKIEREDFLRKQRTFDNGSIPHQIHLQEMHAILRRQGDYYPFLKENQDRIEKILTFRIPYYVGPLARKNSRFAWAEYHSDEAVMPWNFDQVIDKESSAQAFIEHMTNNDLYLPNEKVLPKHSPLYEKYTVYNELTKIKYVTEIGEAKFFDANLKQEIFDGLFKHERKVTKKKLRTFLDKNFDEFRIVDIQGLDKETETFNASYATYQDLLKVIKDKVFMDNPENAEILENIVLTLTLFEDREMIKQRLAKYADVFDKKVIDQLARRHYTGWGRLSAKLLNGIRDKQSCKTIMDYLIDDAQSNRNLMQLITDDNLTFKDDIVKAQYVDNSDDLHQVVQSLAGSPAIKKGILQSLKIVDELVKVMGKEPEQIVVEMARENQTTAKGRRNSQQRYKRLKEAIKSLDRDLNHKILKEHPTDNQALQNNRLFLYYLQNGRDMYTGESLDINRLSDYDIDHVIPQAFIKDNSIDNRVLTSSKANRGKSDDVPSEDVVNRMRPFWNKLLSSGLISQRKYNNLTKKELTPDDKAGFIKRQLVETRQITKHVARMLDERFNKEFDDNNKRIRRVKIVTLKSNLVSSFRKEFELYKVREINDYHHAHDAYLNAVVVKALLVKYPKLEPEFVYGEYPKYNSYRERKTATQKMFFYSNIMNMFKSKVKLADDQIVERPMIEVNDETGEIAWDKTKHITTVKKVLSYPQVNIVKKVEEQTIGQNGGLFDDNPKSPLEVIPSKLVPLKKALNPEKYGGYQKPTTAYPILLIVDTKQLIPISVMDKKRFEQNPVKFLKDKGYQQIEKNNFVKLPKYTLVDIGNGIKRLWASSKEVHKGNQLVVSKKSQDLLYHAHHLDNDYSNEYVKNHYQQFDILFNEITSFSKKCKLGKEHIQKIEEAYSKERDSASIEELADGFIKLLGFTQLGATSPFSFLGIKLNQKQYTGKKDYLLPCMEATLIHQSITGLYETRIDLNKLGGD

SEQ ID NO: 1270 - protein, 1355 aa, Streptococcus mutans; identical to SEQ ID NO: 1269

SEQ ID NO: 1271 - protein, 1125 aa, Streptococcus mutans
MTNGKILGLDIGIASVGVGIINAKTGNVEHASSRIFPAANADNNVERRSARGGRRLIRRKKHRLKRVEDLFEKYNIDTDFSNLNLNPYQLRVKGLNEQLSNEELFAILKNIAKRRGISYLDDAEDDSVGSSDYAKAIDENRKLLKKQTPGEIQLKRLEKYGQLRGNFTIQDENGEYHRLINVFSTSDYVKEARRILETQSYYNKFITESFVEDYIKILQGKRKYYVGPGNEKSRTDYGIYRTDGETLDNLFGILIGKCGFYPEEYRAAKASYTAQEYNFLNDLNNLTVPTETKKLSTEQKYQLVDFAKTASTLEAAKLLKEIAKLVGCQVEEIKGYRLDNKDKPDLHTFEPFRKLKSNLTTIAVENLSITTLDTLAHILTLNTEREGIEEAIQKELPNIFSDEQITGIIAVRKKNSQIFGKGWHSFSIKLMKELIPELYETSEEQMTILIRLKKVKTNSKITNRTKYINEQEVTDEIYNPVVSKSIRQTVKIINAAIKKYGAFDQIVIEMPRESNEEDERKFIADLQKSNAKEKDDAMKQAALLYNGKAELPHGVFHGHKELATKIRLWYQQGERCLYSGKHIDIHDLIHNQHMFEIDHVLPLSLSFDDSLANKVLVYSWANQEKGQRTPFQALPQMASAWSFRELRDYISKQKGISKKKRDYLLTEQDINKVEVKQKFIERNLVDTRYVSRVVLNTLQDALKVMNKETKISVIRGQFTSQLRRQWRIDKSRETYHHHAVDALIIAASSQLRLWKKQNNPMFAEDKHGQKINLDTGEVLSDDAYKELVYQAPYQGFVNTISSKSFEDEILFSYQVDSKVNRKISDATIYATRQAQLGKDKKEETYVLGKIKDIYSQAGYDAFRKKYDKDKAVFLMYQKDPETWEKVIEVILRDYKELDDKGKEIGNPFERYKVKHGFVRKYSRKNKGTEIKSLKYYDNKLGNHIDITPNNSKHSVVLQSINPWRADLYFNPETTKYELMGLKYADLSFEKGTGKYSISREKYDEIKEREGISSKSEFKFTLYKNDLILVKDIGNHKELIARFNSKNDTSKHYVELKPWNKAKFDSEEELIPAFGKVAKSGQFIKGLNKPDLSIYKVKTDILGHKYYIKKEGDKPKLNFENKIKNK

SEQ ID NO: 1272 - protein, 1125 aa, Streptococcus mutans
MTNGKILGLDIGIASVGVGIINAKTGNVEHASSRIFPAANADNNVERRSARGGRRLIRRKKHRLKRVEDLFEKYNIDTDFSNLNLNPYQLRVKGLNEQLSNEELFAILKNIAKRRGISYLDDAEDDSVGSSDYAKAIDENRKLLKKQTPGEIQLKRLEKYGQLRGNFTIQDENGEYHRLINVFSTSDYVKEARRILETQSYYNKFITESFVEDYIKILQGKRKYYVGPGNEKSRTDYGIYRTDGETLDNLFGILIGKCGFYPEEYRAAKASYTAQEYNFLNDLNNLTVPTETKKLSTEQKYQLVDFAKTASTLGAAKLLKEIAKLVGCQVEEIKGYRLDNKDKPDLHTFEPFRKLKSNLTTIAVENLSITTLDTLAHILTLNTEREGIEEAIQKELPNIFSDEQITEIIAVRKKNSQIFGKGWHSFSIKLMKELIPELYETSEEQMTILTRLKKVKTNSKITNRTKYINEEEITDEIYNPVVSKSIRQTVKIINATIKKYGAFDQIIIEMPRESNEEDERKFIADLQKSNAKEKDDAMKQAALLYNGKDELPHDVFHGHKELATKIRLWYQQGERCLYSGKHIDIHDLIHNQHMFEIDHVLPLSLSFDDSLANKVLVYSWANQEKGQRTPFQALPQMASAWSFRELRDYISKQKGISKKKRDYLLTEQDINKVEVKQKFIERNLVDTRYVSRVVLNTLQDALKVMNKETKISVIRGQFTSQLRRQWRIDKSRETYHHHAVDALIIAASSQLRLWKKQNNPMFAEDKHGQKINLDTGEVLSDDAYKELVYQAPYQGFVNTISSKSFEDEILFSYQVDSKVNRKISDATIYATRQAQLGKDKKEETYVLGKIKDIYSQAGYDAFRKKYDKDKAVFLMYQKDPETWEKVIEVILRDYKELDDKGKEIGNPFERYKVKHGFVRKYSRKNKGTEIKSLKYYDNKLGNHIDITPNNSKHSVVLQSINPWRADLYFNPETTKYELMGLKYADLSFEKGTGKYSISREKYDEIKEREGISSKSEFKFTLYKNDLILVKDIGNHKELIARFNSKNDTSKHYVELKPWNKAKFDSEEELIPAFGKVAKSGQFIKGLNKPDLSIYKVKTDILGHKYYIKKEGDKPKLNFENKIKNK

SEQ ID NO: 1273 - protein, 1125 aa, Streptococcus mutans; identical to SEQ ID NO: 1272

SEQ ID NO: 1274 - protein, 1125 aa, Streptococcus mutans; identical to SEQ ID NO: 1271

SEQ ID NO: 1275 - protein, 670 aa, Streptococcus oralis
MAKFNKNYSIGLDIGVSSVGYAVVTEDYRVPAFKFKVLGNTEKEKIKKNLIGSTTFVPAQSAQGTRVFRVNRRRIDRRNHRIAYLRDIFQKEIGKIDKNFYRRLDESFRVLGDKSEDIQIKQPFFGNKELETAYHKKYPTIYHLRKHLADADKNSPVADIREVYMALSHIFKYRGHFLTLGKIDPNNINMQNSWIDFIESCQDAFDLEISDESKTIAAIFKSSDNRQEKVKGILSYFQPELAKKDKSIFKQLLQLLFGLKTKFKECFELEEEPDLNFSKENYDENLENLLGTLEEDFPDVFAKLKILRDTILLSDMLTYTGATHARFSATMVERYEEHRKDLQRFKSFVKQNLSEQDYLDIFGRKTPNGFDVDKETKGYVGYISNKMVLTNKQKTIQQNFYDYISGKITGIEGAEYFLNKISDGTFLRKLRTTDNGTIPNQIHAYELEKIIERQGRDYPFLLENKDKLLSILTFKIPYYVGPLAKGNNSRFAWIKRTTSQDVLDNNDEDTKNGKIRPWNYHKLINMDETRDAFITNLIGNDIILLNEKVLPKRSLIYEEVMLQNELTRIKYKDKYGKIHFFDSELRQEIINNLFKTNSKRVSSAMLLAYLENFTNLQAVEIVSGIEKGKSLNSTLKTYNDLKTIFSEDLLDSEIYQKELEEIIKVITVFV

SEQ ID NO: 1276 - protein, 1373 aa, Streptococcus oralis
MENKNYSIGLDIGTNSVGWAVITDDYKVPSKKMKVLGNTDKRFIKKNLIGALLFDEGTTAEARRLKRTARRRYTRRKNRLRYLQEIFAEEMSKVDSSFFHRLDDSFLIPEDKKGSKYPIFATLIEEKEYHKQFPTIYHLRKQLADSKEKTDLRLIYLALAHMIKYRGHFLYEDTFDIKNNDIQKIFNEFISIYNNTFEGNSLSGQNVQVEAIFTDKISKSAKRERVLKLFPDEKSTGLFSEFLKLIVGNQADFKKHFDLEEKAPLQFSRDTYDEDLENLLGQIGDDFADLFVAAKKLYDAILLSGILTVTDPSTKAPLSASMIERYENHQKDLATLKQFIKTNLPEKYDEVFSDQSKDGYAGYIDGKTTQESFYKYIKNLLSKFEGADYFLEKIEREDFLRKQRTFDNGSIPHQIHLQEMNAILRRQGEHYPFLKENKEKIEKILTFRIPYYVGPLARGNRDFAWLTRNSDQAIRPWNFEEIVDKASSAESFINKMTNYDLYLPEEKVLPKHSLLYETFAVYNELTKVKFIAEGLRDYQFLDSRQKKDIFYTLFKAEDKRKVTEKDIIQYLHTVDGYDGIELKGIEKQFNASLSTYHDLLKIIKDKEFMDDPNNEEILENIVHTLTIFEDREMIKQRLAQYDSLFDEKVIKALTRRHYTGWGKLSSKLINGIRDKQTGKTILDYLMDDGYNNRNFMQLINDDELSFKEIIKKAQVVGKTDDVKQVVQELPGSPAIKKGILQSIKLVDELVKVMGHEPESIVIEMARENQTTARGKKNSQQRYKRIEDSLKILASGLNAKILKEHPTDNIQLQNDRLFLYYLQNGRDMYTGKPLDINQLSSYDIDHIVPQAFIKDDSLDNRVLTSLKDNRGKSDNVPSLEVVEKMKTFWQQLLDSKLISYRKFNNLTKAERGGLDERDKVGFIKRQLVETRQITKHVAQILDARYNTEVNEKDKKNRTVKIITLKSNLVSNFRKEFRLYKIREINDYHHAHDAYLNAVVAKAILKKYPKLEPEFVYGDYQKYDLKRYISRSKDPKEIEKATEKYFFYSNLLNFFKEEVHYADGTIVKRENIEYSKDTGEIAWNKEKDFATIKKVLSLPQVNIVKKREVQTGGFSKESILPKGNSDKLIPRKTKDILWDTTKYGGFDSPVIAYSILLIADIEKGKAKRLKTVKTLVGITIMEKATFEKSPIAFLENKGYHNVRKENILCLPKYSLFELKNGRRRMLASAKELQKGNEIVLPVHLTTLLYHAKNIHRLDEPEHLEYIQKHRNEFKGLLNLVSEFSQKYVLADANLEKIKNLYADNEQADIEILANSFINLLTFTALGAPAAFKFFGKDVDRKRYTTVSEILNATLIHQSITGLYETRIDLSKLGED

SEQ ID NO: 1277 - protein, 1371 aa, Streptococcus oralis
MENKNYSIGLDIGTNSVGWSVITDDYKVPSKKMKVLGNTDKRFIKKNLIGALLFDEGTTAEARRLKRTARRRYTRRKNRLRYLQEIFAEEMSKVDSSFFHRLDDSFLIPEDKRGSKYPIFATLAEEKEYHKQFPTIYHLRKQLADSKEKTDLRLIYLALAHMIKYRGHFLYEDTFDIKNNDIQKIFSEFISIYDNTFEGSSLSGQNAQVEAIFTDKISKSAKRERVLKLFPDEKSTGLFSEFLKLIVGNQADFKKHFDLGEKAPLQFSKDTYDEDLENLLGQIGDDFADLFLVAKKLYDAILLSGILTVTDPSTKAPLSASMIERYENHQKDLAVLKQFIKNNLPEKYDEVFSDQSKDGYAGYIDGKTTQEAFYKYIKNLLSKFEGTDYFLEKIEREDFLRKQRTFDNGSIPHQIHLQEMNAILRRQGEHYPFLKDNKEKIEKILTFRIPYYVGPLARGNRDFAWLTRNSDEAIRPWNFEEIVDKASSAEDFINKMTNYDLYLPEEKVLPKHSLLYETFAVYNELTKVKFIAEGLRDYQFLDSGQKKQIVTQLFKEKRKVTEKDIIQFLHNVDGYDGIELKGIEKQFNASLSTYHDLLKIIKDKEFMDDSKNEEILENIVHTLTIFEDREMIKQRLAQYDSLFDEKVIKALIRRHYTGWGKLSAKLIDGICDKQTGNTILDYLIDDGKNNRNFMQLINDDGLSFKEITQKAQVVGKTDDVKQVVQELPGSPAIKKGILQSIKIVDELVKVMGHTPESIVIEMARENQTTARGKKNSQQRYKRIEDALKNLASGLDSNILKEHPTNNIQLQNDRLFLYYLQNGRDMYTGKPLDINQLSSYDIDHIVPQAFIKDDSLDNRVLTSLKDNRGKSDNVPSIEVVQKRKAFWQQLLDSKLISERKFNNLTKAERGGLDERDKVGFIKRQLVETRQITKHVAQILDARFNKEVNEKDKKNRTVKIITLKSNLVSNFRKEFRLYKVREINDYHHAHDAYLNAVVAKAILKKYPKLEPEFVYGDYQKYDLKRYISRSRNPKEVEKATEKYFFYSNLLNFFKEEVHYADGTIVKRENIEYSKDTGEIAWNKEKDFATIKKVLSYPQVNIVKKREVQTGGFSKESILPKGNSDKLIPRKTKDILWETTKYGGFDSPVIAYSILLIADIEKGKAKKLKTVKTLVGITIMEKAAFEENPITFLENKGYHNVRKENILCLPKYSLFELENGRRRLLASAKELQKGNEIVLPVYLTTLLYHSKNVHKLDEPEHLEYIQKHRNEFKDLLNLVSEFSQKYVLADANLEKIQNLYADNEQADIEILANSFINLLTFTALGAPAAFKFFGKDIDRKRYTTVSEILNATLIHQSITGLYETRIDLSKLGED

SEQ ID NO: 1278 - protein, 1121 aa, Streptococcus oralis
MNGLVLGLDIGIASVGVGILEKNSGKIIHANSRLFPAATADNNVERRKNRQARRLNRRKKHRGVRFQDLFEDYGLLTDFSKVSINLNPYRLRVDGLNQQLTNEELFIALKNIVKRRGISYLDDASEDGGAVSSDYGKAVEENRKLLAEQTPGQIQLERFEKYGQVRGDFTVVENGEKCRLINVFSTSAYRKEAEKILRKQQEFNNQITDEFIEDYLKILTGKRKYYHGPGNEKSRTDYGRFRTDGTTLDNIFGVLIGKCTFYPNEYRASKSSYTAQEFNLLNDLNNLTVPTETKKLSEEQKKVIVEYAKEAKTLGASTLLKYIVKMIDASVDQISGYRVDVNNKPEMHTFEVYRKMQSLETISVGELSRNVLDELAHILTLNTEREGIEEAINSKLMGVFSQDQVLELVQFRKNNSSLFSKGWHNFSLKLMMELIPELYETSEEQMTILTRLGKQKSKETSKRTKYIDEKELTEEIYNPVVAKSVRQAIKIINEATKKHGIFDNIVIEMARENNEEDAKKDYIKRQKANQDEKNAAMEKAAFQYNGKKELPGNIFNGHKELATKIRLWHQQGEKCLYTGKTIPISDLIHNQYKYEIDHILPLSLSFDDSLSNKVLVHATANQEKGQRTPFQALDSMDDAWSYREFKSYVKDLKSLSNKKKDYLLTEEDISKIEVKQKFIERNLVDTRYSSRVVLNALQDFYKSHQFDTTISVVRGQFTSQLRRKWGLEKSRETYHHHAVDALIIAASSQLRLWKKQNNPLITYKEGQFVDSQTGEIISLTDDEYKELVFKAPYDHFVDTLHSKTFEDGILFSYQVDSKYNRKISDATIYATRKAKLDKDKSEETYVLGKIKDIYSQAGYDAFIKIYNKDKRKFLMYHKDPQTFEKVIEEILRTYPSKERNDKNKEVPCNPFEKYRQENGPIRKYSKKGNGPEIKCLKYYDNKLGNYIDISPDGSDNQVVLQSLKPWRTDVYFNHQTKEYELMGLKYSDLSFEKGSGKYSISNEKYNSIKRIEGVNEQSEFKFTLYKNDLILIKDSENNEQKLFRFNSRNDTAKHYVELKPYDKARFDGQQELITILGNVAKGGQCLKGLNKSNISIFKVKTDVLGKKHIIKKEGDEPKLKF

SEQ ID NO: 1279 - protein, 1134 aa, Streptococcus oralis
MNGLVLGLDIGIASVGVGILEKNSGKIVHASSRIFPAATADNNVERRKNRQARRLHRRKKHRGARLKDLFEYYGLLTDFSKVSINLNPYRLRVDGLDQQLTNEELFIALKNIVKRRGISYLDDASEDGGTVSSDYGKAVEENRKLLAEQTPGQIQLERFEKYGQLRGDFTVVENSEKCRLINVFSTSAYKKEAERILRKQQEFNNQITDEFIEDYLKILTGKRKYYHGPGNEKSRTDYGRFRTDGATLDNIFGILIGKCTFYPNEYRASKASYTAQEFNLLNDLNNLTVPTETKKLSEEQKKTIIEYAKSAKTLGASTLLKYIAKMIDASVDQIRGYRVDVNNKPEMHTFEVYRKMQSLETISVGELSRNILDELAHILTLNTEREGIEEAINTKLRDSFSQDQVLELVQFRKNNSSLFSKGWHNFSLKLMMELIPELYETSEEQMTILTRLGKQKSKETSKRTKYIDEKEVTEEIYNPVVAKSVRQAIKIINEATKKHGIFDNIVIEMARENNEEDAKKDYIKRQKANQDEKYAAMEKAAFQYNGKKELPDNIFHGHKELATKIRLWHQQGEKCLYTGKSIPISDLIHNQYKYEIDHILPLSLSFDDSLSNKVLVLATANQEKGQRTPFQALDSMDDAWSYREFKSYVKESKLLGNKKKEYLLTEEDISKIEVKQKFIERNLVDTRYSSRVVLNALQDFYKNHNFDTTISVVRGQFTSQLRRKWGLEKSRETYHHHAVDALIIAASSQLRLWKKQNNPLIAYKEGQFVDSQTGEIISLTDDEYKELVFKAPYDHFVDTLSSKTFEDSILFSYQVDSKFNRKISDATIYATRKAKLDKEKKEYTYTLGKIKDIYSLGTKTPSKTGFYKFLDLYNKDKSQFLMFQKDRKTWDEVIEKIMEQYRPFKEYDKAGKLVDFNPFEKYRQENGPIRKYSKKGNGPEIKSLKYYDILLGKHKNITPEGSRNTVALLSLNPWRTDVYYNMETKKYEFLGLKYADLPFEEGGAYGISTETYNELREKEGIGKNSEFKFTLYKNDLILIKDTETNCQQFFRFWSRTGKDNPKSFEKHKIELKPYEKAKFEKGEELEVLGKVPPSSNQFQKNMQIENLSIYKVKTDVLGNKHFIKKEGDKPKLKF

SEQ ID NO: 1280 - protein, 550 aa, Streptococcus oralis
MYSLDKNGSPTPLYRDQLNQYEVDHIIPYSFLPIDSIDNKVLTHRENNQRKLDNIPDKETVANMKPFWEKLYNAKLISQTKYQRLTTSERTPDGVLTESMKAGFIERQLVETRQIIKHVARILDNRFSDTKIITLKSQLVTNFRNTFHIAKIRELNDYHHAHDAYLAVVVGQTLLKAYPKLAPELIYGHHAHFNRHEENKATIRKYLYSNIMRFFNNPDSKVSKDIWDCNRDLPIIKDIIYNSQVNFVKRTMIKKGAFYNQNPVGKFNKQIAANNRYPLKTKVSSLDTSIYGGYGPMNSALSIIIIAERFNEKKCKIETVKEFHDIFIIDYKKFNNDPFQFLNDTSENGFLKKNNINRVLAFYRVPKYSLMQKIDGTRMLFESKSNLHKATQFKLTKTQNELFFHMRRLLTKSNLMDLKSESAIKESQNFILKHKEEFDNISNQLSAFSQKMLGDTTSLKNLIKGYNERKIKEINSSEETIKYFYDNFIKMFSFVKSGAPKDINDFFNNKYTVARMRPKPDKKLLNATLIHQSITGLYETRIDLSKLGED

SEQ ID NO: 1281 - protein, 1140 aa, Streptococcus parasanguinis
MNGLVLGLDIGIASVGVGILKKDIGEIIHTNSRLFSAATADSNIERRGHRGGKRLTRRKKHRSIRLHDLFEDFGLLTDFSKVSINLNPYQLRVQGLDNQLTNEELFIALKNIVKRRGISYLDDASEDGGTVSSDYGKAVEENRKLLAEQTPGQIQLDRFEKYGQVRGDFNVVENGEKRRLINVFTTSAYSKEAERILRKQQEFNKKITDEFIEDYLTILTGKRKYYHGPGNEKSRTDYGRYTTKKDPEGKYITLDNIFGILIGKCTFYPDEYRASKASYTAQEFNLLNDLNNLTVPTETKKLSEEQKKTIIKYAKTAKTLGASTLLKYIAKLIGASVDQIHGYRIDPNKKPEMHTFETYRKMQSLETISVEELPRKVLDELAHILTLNTEREGIEEAINATLKDTFSQDQVLELVQFRKNNSSLFSKGWHSFSLKLMMELIPELYETSEEQMTILTRLGKQKSKETSKRTKYIDEKELTEEIYNPVVAKSVRQAIKIINEATKKYGIFDNIVIEMARENNEEDAKKEYIKRQKANLDEKNAAMEKAAFQYNGKKELPDNVFHGHKELATKIRLWHQQGEKCLYTGKNIPISDLIQNQYKYEIDHILPLSLSFDDSLSNKVLVLATANQEKGQRTPFQALDSMDDAWSYREFKSYVKDSKLLGNKKKEYLLTEEDISKIEVKQKFIERNLVDTRYSSRVVLNALQDFYKEHQFDTTISVVRGQFTSQLRRKWGLEKSRETYHHHAVDALIIAASSQLRLWKKQNNPLISYTEGQFVDQVTGEIISLSDDEYKELVFKAPYDHFVDTLKSKKFEDSILFSYQVDSKYNRKISDATIYATRKAKLDKENKEYTYTLGKIKDIYALGTKSPSKTGFYKFLDLYNKDKSQFLMFQKDRKTWDEVIEKIIEQYRPFKEYDENGKEVDFNPFEKYRIENGPIRKYSKKGNGPEIKSLKYYDNLLGKFVDITPSESKNPVALLSLNPWRTDVYYNTETSKYEFLGLKYADLCFEKGGAYGISEVKYNKIREKEGIGKESEFKFTLYKNDLILIKDTETNCQQIFRFWSRTGKDNPKSFEKHKIELKPYEKARFEKGEELEVLGKVPPSSNQLQKNMQIENLSIYKVKTDVLGNKHFIKKEGEEPKLKF

SEQ ID NO: 1282 - protein, 1374 aa, Streptococcus pseudoporcinus
MKKRYSYSIGLDIGTNSVGWAVINEDYKVPAKKMTVFGNTDRKTIKKNLLGTVLFDSGETAQARRLKRTNRRRYTRRRYRLCQLQNIFATEMVKVDDTFFQRLSESFFYYQDKAFDKHPIFGNSKEERAYHKTYPTIYHLRKDLADRDQKADLRLIYLALSHIIKFRGHFLIEGKLNSENTDVQKLFIALVTVYNLLFEEEPIAGETCDAKALLTAKTSKSKRLESLISEFPGQKKNGLFGNLLALALGLRPNFKSNFGLSEDAKLQITKDTYEEELDNLLAEIGDHYADLFLAAKNLSDAILLSDILTLSDENTRAPLSASMIKRYEEHQEDLALLKKLVKEQMPEKYWEIFSNAKKNGYAGYIEGKVSQEDFYRYIKPILSRLKGGDEFLAKIDRDDFLRKQRTFDNGSIPHQIHLKELHAILRRQEKYYPFLAEQKEKIEQLLCFRIPYYVGPLAKGGNSSFAWLKRRSDEPITPWNFKDVVDEEASAQAFIEGMTNYDTYLPEEKVLPKHSPLYEMFTVYNELTKVKYIAENMTKPLYLSAEQKEAIIDHLFKQTRKVTVKDLKEKYFSQIEGLENVDVTGVEGAFNASLGTYNDLLKIIKDKAFLDDEANAEILEEIVLILTLFQDEKLIEKRLAKYANLFEKSVLKKLRKRHYRGWGRLSRQLIDGMKDKASGKTILDFLKADDFANRNFIQLINDSSLDFEKLIDDAQKKAIKRESLTEAVANLAGSPAIKKGILQSLKVVDEIVKVMGHNPDNIVIEMSRENQTTAQGLKNARQRLKKIKEVHKKTGSRILEDNSERITNLTLQDNRLYLYLLQDGKDMYTGQDLDINNLSQYDIDHIIPQSFIKDNSIDNLVLTTQKANRGKSDNVPSIEVVRDMKDRVWRRQLANGAISRQKFDHLTKAERGGLADSDKARFLRRQLVETRQITKHVAQLLDSRFNSKSNQNKKLARNVKIITLKSKIVSDFRKDFGLYKLREVNNYHHAHDAYLNAVVGTALLKKYPKLEAEFVYGDYKHFDLVKLISKSDPSLGKATAKVFFYSNIMNFFKEELSLADGTLMKRPVIETNTETGEVVWDKVKDFKTIRKVLSYPQVNIVKKTEIQSGAFSKESVLSKGNSDKLIERKKGWDPKKYGGFDSPNTAYSIFVVAKVAKRKAQKLKTVKEIVGITIMEQAEYEKDNIAFLEKKGYQDIQEKLLIKLPKYSLFELENGRRRLLASANEFQKGNELALSGKYMKFLYLASRYDKLSSKIESEQQKKLFVEQHLHYFDEILDIVVKHATCYIKAENNLKKIISLYKKKEAYSINEQALNMLNLFIFTSLGAPSTFVFFDETIDRKRYTTSSDVLNGILIQQSITGLYETRIDLSRFGGD

SEQ ID NO: 1283 - protein, 1052 aa, Streptococcus pyogenes
LSASMIKRYDEHHQDLTLLKALVRQQLPEKYKEIFFDQSKNGYAGYIDGGASQEEFYKFIKPILEKMDGTEELLAKLNREDLLRKQRTFDNGSIPHQIHLGELHAILRRQEDFYPFLKDNREKIEKILTFRIPYYVGPLARGNSRFAWMTRKSEETITPWNFEEVVDKGASAQSFIERMTNFDKNLPNEKVLPKHSLLYEYFTVYNELTKVKYVTEGMRKPAFLSGEQKKAIVDLLFKTNRKVTVKQLKEDYFKKIECFDSVEISGVEDRFNASLGTYHDLLKIIKDKDFLDNEENEDILEDIVLTLTLFEDREMIEERLKTYAHLFDDKVMKQLKRRRYTGWGRLSRKLINGIRDKQSGKTILDFLKSDGFANRNFMQLIHDDSLTFKEDLQKAQVSGQGDSLHEHIANLAGSPAIKKGILQTVKVVDELVKVMGRHKPENIVIEMARENQTTQKGQKNSRERMKRIEEGIKELGSDILKEYPVENTQLQNEKLYLYYLQNGRDMYVDQELDINRLSDYDVDHIVPQSFLKDDSIDNKVLTRSDKNRGKSDNVPSEEVVKKMKNYWKQLLNAKLITQRKFDNLTKAERGGLSELDKAGFIKRQLVETRQITKHVAQILDSRMNTKYDENDKLIREVRVITLKSKLVSDFRKDFQFYKVREINNYHHAHDAYLNAVVGTALIKKYPKLESEFVYGDYKVYDIRKMIAKSEQEIGKATAKYFFYSNIMNFFKTEITLANGEIRKRPLIETNGETGEIVWDKGRDFATVRKVLSMPQVNIVKKTEVQTGGFSKESILPKRNSDKLIARKKDWDPKKYGGFDSPTVAYSVLVVAKVEKGKSKKLKSVKELVGITIMERSSFEKDPVDFLEAKGYKEVRKDLIIKLPKYSLFELENGRKRMLASAGELQKGNELALPSKYVNFLYLASHYEKLKGSPEDNEQKQLFVEQHKHYLDEIIEQISEFSKRVILADANLDKVLSAYNKHRDKPIREQAENIIHLFTLTNLGAPAAFKCFDTTIGRNRYKSIKEVLDATLIHQSITGLYETRIDLSQLGGD

SEQ ID NO: 1284 - protein, 1368 aa, Streptococcus pyogenes; identical to SEQ ID NO: 37

SEQ ID NO: 1285 - protein, 1367 aa, Streptococcus pyogenes; identical to SEQ ID NO: 241

SEQ ID NO: 1286 - protein, 1368 aa, Streptococcus pyogenes [sequence omitted]

SEQ ID NO: 1287 - protein, 1370 aa, Streptococcus ratti
MKKPYSIGLDIGTNSVGWAVITDDYKVPAKKMKVLGNTDKNYIKKNLLGALLFDSGNTAEDRRLKRTARRRYTRRRNRLLYLQDIFSDEMNKVDESFFHRLEDSFLVSEDKRGDHHPIFGNVVDEVKYHEQFPTIYHLRKYLADTPEKADLRLVYLALAHMIKFRGHFLIDDPKLDVKNTDSQELFSQFLTAYDVTQEDSHLADVKINISDIITEKMNKSRKVEALLFHFPSQKKNSFFGNLVSLVFGLLPNFKTNFNLAEDAKLQLSKDSYDEDLENLLGQIGDEYTDVFVAARKLYDSILLSGILTVNDLSTKAILSASMVRRYEEHNKDLAKLKAFVKANFTHDVFKEVFSDASKNGYAGYIEGKTSQEDFYKYVKNLIGKVDGSADFIEKIDREDFLRKQRTFDNGSIPHQVHLAEMKAILRRQGEYYPFLKEHAEKIQQILTFRIPYYVGPLDRHGHSDFAWASFNSEEKVTPWNFEEIIDKNKSAQAFIERMTNQDLYLPNEKVLPKHSPLYEKYTVYNELTKIKYVTETGTAKFFDANLKQEIFDGLFKKERKVTKRKLLTFLEKNFDEFRIVDIQGLDKETETFNASYGIYQDLLKIIKDKAFMDDSENADILEDIVLTLTLFEDREMIKQRLAKYADLFDKKVIDNLARRRYTGWGRLSAKLLNGIRDKRSRKTIMDYLVDDGRSNRNLMQLITDDNLTFKDEIAKAQYSDNSDDLHQVVQDLAGSPAIKKGILQSVKIVDELVKVMGYEPEQIVVEMARENQTTAKGRRNSQQRYKRLEEAIKNLDRDLNYKILKEHPTDNQALQNDRLFLYYLQNGRDMYTGESLDINRLSDYDIDHIIPQAFIKDNSIDNRVLVSSAKNRGKSDDVPSEDVVNRMRPFWNKLLNCGLISQRKYSNLTKKELTPNDKAGFIKRQLVETRQITKHVARILDEHFNKEFDEDKKRIRKVKVVTLKSNLVSNFRKEFELYKVREINDYHHAHDAYLNAVVAKALLMKYPKLEPEFVYGEYPKYNSYRERKTATQRMFFYSNIMNMFKSKVKLADERIIERPMIEVNDETGEIAWDKTKHIATVKKVLSYPQINIVKKVEEQTGGLTNETIYPRGSFDKLLNRKNTLEASKYGGFGSPTVAYCVLVVADSKNENGKVKKLKLGSELLGITILEKNDFENNSLDFLSRKGYQGVQEKKIIKLPKYSLFEFQDGSRRMLSSVMANDNKRGDLQKANEMILPAYLVKLLYHAKHINSVGEPAHKNYINEHCSEFQDLLNYIRQFADKFVDVDKNLSKIRSLSKSMAEYSVSEICSSFVNLLTLTALGAPADFKFFGTTIPRKRYGSPQSILSATLIHQSITGLYETRIDLSKLGED

SEQ ID NO: 1288 - protein, 1135 aa, Streptococcus salivarius
MSDLVLGLDIGIGSVGVGILNKVTGEIIHKNSRIFPAAQAENNLERRTNRQGRRLTRRKKHRRVRLNHLFEESGLITDFTKVSINLNPYQLRVKGLTAELSNEELFIALKNMVKHRGISYLDDASDDGNSSVGDYAQIVKENSKQLETKTPGQIQLERYQKYGQLRGDFTVEEDGRKHRLINVFPTSAYHAEALRILQTQQEFNPQITDEFINSYLEILTGKRKYYHGPGNEKSRTDYGKYTTKKDAQGQYITLNNIFGILIGKCTFYPEEYRAAKASYTAQEFNLLNDLNNLTVPTETKKLSEEQKYQIITYVKNEKAMGPAKLFKYIAKLLACDIADIKGYRIDKSDKAEIHTFEAYRKMKTLETIDIEQIEREKLDKLAYVLTLNTEREGIQEALDHEFADGTFSQEQVDELVQFRKANSSIFGKGWHSFSVKLMMELIPELYATSEEQMTILTRLGKQKTTSSSNKTKYIDEKQLTEEIYNPVVAKSVRQAIKIVNAAIKKYGDFDNIVIEMARETNEDDEKKAIQKIQKANKAEKDAAMRKAANQYNGKAELPHSVFHGHKQLATKIRLWHQQGERCLYTGKTISIHDLINNPNQFEIDHILPLSITFDDSLANKVLVYATANQEKGQRTPYQALDSMDDAWSFRELKAFVRESKALSNKKKEYLLTEEDISKFDVRKKFIERNLVDTRYASRVVLNALQEHFKAHKIDTKVSVVRGQFTSQLRRHWGIDKTRDTYHHHAVDALIIAASSQLNLWKKQKNTLVSYSEDQLLDIETGELISDDEYKESVFKAPYQHFVDTLKSKEFEDSILFSYQVDSKFNRKISDATIYATRQAKVGKDKKDETYVLGKIKDIYALGTKTPSKTGFYKFLDLYNKDKSQFLVYQKDRKTWDEVIEKIMEQYRPFKESDKNGKEVDFNPFEKYRIENGPIRKYSRKGNGPEIKSLKYYASKLGNHIDITPKDSNNKVVLQSVSPWRADVYFNKTTGSYEILGLKYADLQFEKGTGTYRISEEKYNDIKKKEGVDSDSEFKFTLYKNDLLLIKDTETKEQRLFRFLSRSMPNKKHYVELKPYSKDKFEKNESLIEILGSADKSGRCIKGLAKSNLSIFKVRTDVLGNQHIIKNEGDKPKLDF

SEQ ID NO: 1289 - protein, 1127 aa, Streptococcus salivarius
MSDLVLGLDIGIGSVGVGILNKVTGEIIHKNSRIFPAAQAENNVERRINRQGRRLTRRKKHRRVRLNHLFEESGLITDFTNVSINLNPYQLRVKGLTDELSNEELFIALKNMVKHRGISYLDDASDDGNSSVGDYAQIVKENSKQLETKTPGQIQLERYQKYGQLRGDFTVEEDGKKHRLINVFPTSAYRAEALRILQTQQEFNPQITDEFINSYLQILTGKRKYYHGPGNEKSRTDYGRYTTKKDSEDEYITLDNIFGILIGKCTFYPEEYRAAKASYTAQEFNLLNDLNNLTVPTETKKLSEEQKNQIITNVKNEKAMGPAKLFKYIAKLLSCDVADIKGYRIDKSDKAEIHTFEAYRKMKTLATIDIEQMERENLDKLAYVLTLNTEKEGIQEALEHEFADGTFSQEQIDELVQFRKANSSIFGKGWHSFSVKLMMELIPELYATSEEQMTILTRLGKQKTTSSSNKTKYIDEKQLTEEIYNPVAAKSVRQAIKIVNAAIKEYGDFDNIVIEMARETNEDDEKKAIQKIQKANKDEKDAAMLKAANQYNGKAELPHSVFHGHKQLATKIRLWHQQGERCLYTGKTISIHDLINNSNQFEIDHILPLSITFDDSLANKVLVYATANQEKGQRTPYQALDSMDDAWSFRELKAFVRDSKALSNKKKEYLLTEEDISKFDVRKKFIERNLVDTRYASRVVLNALQEHFRVHKTDTKVSVVRGQFTSQLRRHWGIEKTRDTYHHHAVDALIIAASSQLNLWKKQKNTLVSYSEDQLLDIETGELISDDEYKESVFKAPYQHFVDTLKSKEFEDSILFSYQVDSKFNRKISDATIYATRQAKVGKDKKDETYVLGKIKDIYSQTGYDAFIKIYKKDKSKFLMYRHDPQTFEKVIEPILENYPNKELNEKGKEVPCNPFLKYKEDHGYIRKYSKKGNGPEIKSLKYYDSKLGNHIDITPKNSNNKVVLQSVSPWRADVYFNKTTGKYEILGLKYADLKFEKGTGTYKISEEKYNDIKIKEGVDSDSEFKFTLYKNDLLLIKDTETKEQQLFRFLSRTMPNVKHYVELKPYDKQKFDDNEELIKILGIVAKGGQCKKGVSKPNISIYKIRTDVLGNQHIIKNEGDKPKLDF

SEQ ID NO: 1290 - protein, 1385 aa, Streptococcus salivarius
MTKPYSIGLDIGTNSVGWAVITDDYKVPSKKMKVLGNTSKKYIKKNLLGALLFDSGITAEGRRLKRTARRRYTRRRNRILYLQEIFSTEMATLDDAFFQRLDDSFLVPDDKRDSKYPIFGNLVEEKVYHDEFPTIYHLRKHLADSSKKADLRLVYLALAHMIKYRGHFLIEGDFNSKNNDLQKNFQDFLDTYNAIFESDLSLENSKQLEEIVKDKISKSAKKDRILKLFPGEKNSGIFSEFLKLIVGNQADFRKYFNLDEKTSLQFSKESYDEDLETLLGHIGDDYSDVFLKAKKLYDAILLSGILTVTDNGTEAPLSSAMIMRYKEHEEDLALLKAYIRNISLETYNEVFKDNTKNGYAGYIDGKTSQEDFYVYLKRLLAGLEGADYFLEKIDREDFLRKQRTFDNGSIPYQIYLQEMRAILDKQAKFYPFLAKNKERIEKILTFRIPYYVGPLARGNSDFAWSIRKRNEKITPWNFEDVIDKESSAEAFINRMTSFDLYLPEEKVLPKHSLLYENFTVYNELTKVRFIAEGMRDYQFLDSKQKKDIVRLYFKGKRKVTDKDIIEYLHAIDGYDGIELKGIEKQFNSSLSTYHDLLNIINDKEFLDDSSNETIIEEIIHTLTMFEDREMIKQRLSKFDNIFDKSVLKKLSRRHYTGWGKLSAKLINGIRDEKSGNTILDYLIDDGVSNRNFMQLIHDDALSFKKKIKKAQIIGDKDNIKQVVKSLPGSPAIKKGILQSIKIVDELVKVMGREPESIVVEMARENQYTNQGKSNSQQRLKRLEESLKGLGSKILKENVPTRLSKIDNNALQNDRLYLYYLQNGKDMYTGEELDIDRLSNYDIDHIIPQAFLKDDSIDNKVLVSSASNRGKSDDVPSLEVVKKRKTLWYQLLKSKLISQRKFDNLTKAERGGLSQEEKAGFIQRQLVETRQITKHVARLLDERFNNKKDENNRTLRTVKIITLKSSLVSQFRKDFELYKVREINDFHHAHDAYLNAVVASALLKKYPKLEPEFVYGDYPKYNSFRERKSATEKVYFYSNIMNIFKKSIPLADGTVIDRPLIEVNEETGESVWNKVADLNTVRKVLSYSQVNIVKKVEEQNHGLDRGKPKGLFNANLSSKPKPNSKENLVGAKEYLDPKKYGGYAGISNSFAILVKGTIEKGAKKKITNVLEFQGISILDRIYYRKDKLNFLLEKGYKDIELIIELPKYSLFELSDGSRRMLASILSTNNKRGEIHKGNQIFISQKFVKLLYHAKRISSTFNENHRKYVENHKKEFEELFYYILEFNENYVGAKKNGELLKSAFQSWQNHSIDELCSSFIGPTGSERKGLFELTSRGGAADFEFLGVKIPRYRDYTPSSLLKDATLIHQSVTGLYETRIDLGKLGED

SEQ ID NO: 1291 - protein, 1392 aa, Streptococcus sanguinis
MENKNYSIGLDIGTNSVGWAVITDDYKVPSKKMKVFGNTDKHFIKKNLIGALLFDEGATAEDRRLKRTARRRYTRRKNRLRYLQEIFSEEISKLDSSFFHRLDDSFLVPKDKRGSKYPIFATLEEEKEYHKKFPTIYHLRKHLADSKEKTDLRLIYLALAHMIKYRGHFLYEESFDIKNNDIQKIFNEFISIYDNTFEGSSLSGQNAQVEAIFTDKISKSAKRERVLKLFSDEKSTSLFSEFLKLIVGNQADFKKHFDLEEKAPLQFSKDTYDEDLENLLGQIGDGFTDLFLVAKKLYDAILLSGILTVTDPSTKAPLSASMIERYESHQKDLAALKQFIKNNLPKRYNEVFSDQSKDGYAGYIDGKTTQEAFYKYIKNLLSKFEGADYFLDKIEREDFLRKQRTFDNGSIPHQIHLQEMNAILRRQGEHYPFLKENREKIEKILTFRIPYYVGPLARGNRDFAWLTRNSDQAIRPWNFEEIVDKASSAEEFINKMTNYDLYLPEEKVLPKHSLLYETFAVYNELTKVKFIAEGLRDYQFLDSGQKKQIVNQLFKEKRKVTEKDIIHYLHNVDGYDGIELKGIEKQFNASLSTYHDLLKIIKDKEFMDDPKNEEILENIVHTLTIFEDREMIKQRLAQYDSIFDEKVIKALTRRHYTGWGKLSAKLINGICDKQTGDTILDYLIDDGKINRNFMQLINDDGLSFKEIIQKAQVVGKTDDVKQVVQELPGSPAIKKGILQSIKIVDELVKVMGYAPESIVIEMARENQTTARGKKNSQQRYKRIEDSLKNLAPGLDSNILKENPTDNIQLQNDRLFLYYLQNGKDMYTGKPLDIDQLSSYDIDHIIPQAFIKDDSIDNRVLTSSKDNRGKSDNVPSLEVVQKRKAFWQQLLDSKLISERKFNNLTKAERGGLDERDKVGFIRRQLVETRQITKHVAQILDASFNTEVNEKNQKIRTVKIITLKSNLVSNFRKEFELYKVREINDYHHAHDAYLNAVVAKAILKKYPKLEPEFVYGDYQKYDLKRYISRFKPSKEIEKATEKYFFYSNLLNFFKEEVHYADGIIVKRENIEYSKDTGEIAWNKEKDFATIKKVLSYPQVNIVKKTEIQTHGLDRGKPKGLFNSNPSPKPSEDSKENLVPIKQGLDPRKYGGYAGISNSYAVLVKAIVEKGAKKQQKTILEFQGISILDKINFENNKENYLLKKRYIEILSTITLPKYSLFEFPDGTRRRLASILSTNNKRGEIHKGNELVLPGKYTTLLYHAKNINKKLEPEHLEYVEKHRNDFAKLLECVLNFNDKYVGALKNGERIRQAFTDWETVDIEKLCFSFIGPENSKNAGLFELTSQGSASDFEFLGVKIPRYRDYAPSSLLKATLIHQSITGLYETRIDLSKLGED

SEQ ID NO: 1292 - protein, 1377 aa, Streptococcus sanguinis
MKKPYSIGLDIGTNSVGWAVITDDYKVPSKKMKVLGNTDKHFIKKNLIGALLFDEGTTAEDRRLKRTSRRRYTRRKNRLRYLQEIFSEEISKLDSSFFHRLDDSFLVPEDKRGSKYPIFATLEEEKEYHKKFPTIYHLRKHLADSKEKTDLRLIYLALAHMIKYRGHFLYEESFDIKNNDIQKIFNEFISIYDNTFEGSSLSGQNAQVEAIFTDKISKSTKRERVLKLFSDEKSTGLFSEFLKLIVGNQADFKKHFDLEEKAPLQFSKDTYDEDLENLLGQIGDGFADLFLVAKKLYDAILLSGILTVTDPSTKAPLSASMIERYENHQEDLAALKQFIKNNLSEKYAEVFSDQSKDGYAGFIDGKTTQEAFYKYIKNLLSKLEGADYFLNKIEREDFLRKQRTFDNGSIPHQIHLQEMNAILRRQGEHYLFLKENREKIEKILAFRIPYYVGPLARGNRDFAWLTRNSDQAIRPWNFEEVVDKASSAEDFINKMTNYDLYLPEEKVLPKHSLLYETFAVYNELTKVKFIAEGLRDYQFLDSGQKKQIVNQLFKDKRKVTEKDIIHYLHNVDGYDGIELKGIEKQFNASLSTYHDLLKIIKDKEFMDNPKNGEILENIIHTLTIFEDREMIKQRLAQYDTLFDEKVIKALTRRHYTGWGKLSAKLINGIRDKQTGKTILEYLIDDGDCNRNFMQLINDDGLSFKEIIQKAQVVGKTDDVKQVVQEIPGSPAIKKGILQSIKIVDELVKVMGHNPESIVIEMARENQTTAKGKKNSQQRYKRIEDALKNLAPGLDSNILKENPTDNIQLQNDRLFLYYLQNGKDMYTGKAIDINQLSNYDIDHIIPQAFIKDDSLDNRVLTSSKDNRGKSDNVPSIEVVQKRKAFWQQLLDSKLISERKFNNLTKAKRGGLDERDKVGFIKRQLVETRQITKHVAQLLDTRFNTEVNEENQKIRTVKIITLKSNLVSNFRKEFGLYKVREINDYHHAHDAYLNAVVAKAILKKYPKLEPEFVYGDYQKYDLKRYILKSKASNTIDKATEKYFFYSNLLNFFKEKVRYADGTIKKRENIEYSNDTGEIAWNKEKDFATIKKVLSLPQVNIVKKTEEQTVGQNGGLFDNNIVSKKKVVDASKLIPIKSSLSPEKYGGYARPTIAYSVLVIADIEKGKGKAKKLKRIKEIVGITIQDKKKFESNPVTYLEECGYKNINSNLIIKLPKYSLFEFNDGQRRLLASSIELQKGNELILPYHLTALLYHAQRINKISEPIHKQYVEAHQNEFKELLTTIISLSKKYIQKPNVELLLQQAFDQADKDIYQLSESFISLLKLTSFGAPGAFKFLGVEISQSSVRYKPNSQFLDTTLIHQSITGLYETRIDLSKLGED

SEQ ID NO: 1293 - protein, 1370 aa, Streptococcus sanguinis
MKKPYSIGLDIGTNSVGWAVVTDDYKVPAKKMRVFGDTDRSHIKKNLLGTLLFDDGNTAESRRLKRTARRRYTRRRNRILYLQEIFTESMNEIDESFFHRLDDSFLVPEDKRGSKYPIFATLQEEKEYHKQFPTIYHLRKQLADSKEKSDVRLIYLALAHMIKYRGHFLYEETFDIKNNDIQKIFNEFINIYDNTFEGSSLSGQNAQVEAIFTDKISKSAKRERVLKLFPDEKSTGLFSEFLKLIVGNQADFKKHFDLEEKAPLQFSKDTYDEELENLLGQIGDDFADLFLIAKKLYDAILLSGILTVTDPSTKAPLSASMIERYENHQKDLAALKQFIKNNLPEKYVEVFSDQSKDGYAGYIDGKTTQEAFYKYIKNLLSKFEGADYFLDKIEREDFLRKQRTFDNGSIPHQIHLQEMNAILRRQGEHYPFLKENREKIEKILTFRIPYYVGPLARDNRDFSWLTRNSDEPIRPWNFEEVVDKARSAEDFIHRMTNYDLYLPEEKVLPKHSLLYETFAVYNELTKVKFIAEGLRDYQFLDSGQKKQIVNQLFKEKRKVTEKDIIHYLHNVDGYDGIELKGIEKQFNANLSTYHDLLKITKDKEFMDDPKNEEILENIVHTLTIFEDREMIKQRLAQYDTLFDEKVIKALTRRHYTGWGKLSAKLINGIRDKQSGKTILDYLIDDDKINRNFMQLINDDGLSFKEIIQKAQVVGKTDDVKQVVQELPGSPAIKKGILQSIKIVDELVKVMGYALESIVIEMARENQTTARGKKNSQQRYKRIEDALKNLAPGLDSNILKENPTDNIQLKNDRLFLYYLQNGKDMYTGKPLDINQLSSYDIDHIIPQAFIKDDSIDNRVLTSSKDNRGKSDNVPSLEVVQKRKAFWQQLLDSKLISERKFNNLTKAERGGLDERDKVGFIRRQLVETQQITKNVAQILDARFNTEVKEKNQKIRTVKIITLKSNLVSNFRKEFGLYKVREINNYHHAHDAYLNAVVAKAILKKYPKLEPEFVYGDYQKYDLKKYISRFKPSKEIEKATEKYFFYSNLLNFFKEEVLYADGTIRKRENIEYSKDTGEIAWDKEKDFATIKKVLSYPQVNIVKKREVQTGGFSKESILPKGNSDKLIPRKTKDILWDTTKYGGFDSPVIAYSILLIADIEKGKAKKLKTVKTLVGITIMEKAAFEENPITFLENKGYHNVRKENILCLPKYSLFELENGRRRLLASAKELQKGNEIVLPVCLTTLLYHSKNLHKLDEPEHLEYIQKHRNEFKDLLNLVSEFSQKYILAEANLEKIKDLYADNEQADIEILANSFINLLTFTALGAPAAFKFFGKDVDRKRYTTVSEILNATLIHQSITGLYETRIDLSKLGEE

SEQ ID NO: 1294 - protein, 1421 aa, Streptococcus sanguinis
MTKFNKNYSIGLDIGVSSVGYAVVTEDYRVPAFKFKVLGNTEKEKIKKNLIGSTTFVSAQPAKGTRVFRVNRRRIDRRNHRITYLRDIFQKEIEKVDKNFYRRLDESFRVLGDKSEDLQIKQPFFGDKELETAYHKKYPTIYHLRKHLADADKNSPVADIREVYMAISHILKYRGHFLTLDKINPNNINMQNSWIDFIESCQEVFDLEISDESKNIADIFKSSENRQEKVKKILPYFQQELLKKDKSIFKQLLQLLFGLKTKFKDCFELEEEPDLNFSKENYDENLENFLGSLEEDFSDVFAKLKVLRDTILLSGMLTYTGATHARFSATMVERYEEHRKDLQRFKFFIKQNLSEQDYLDIFGRKTQNGFDVDKETKGYVGYITNKMVLTNPQKQKTIQQNFYDYISGKITGIEGAEYFLNKISDGTFLRKLRTSDNGAIPNQIHAYELEKIIERQGKDYPFLLENKDKLLSILTFKIPYYVGPLAKGSNSRFAWIKRATSSDILDDNDEDTRNGKIRPWNYQKLINMDETRDAFITNLIGNDIILLNEKVLPKRSLIYEEVMLQNELTRVKYKDKYGKAHFFDSELRQNIINGLFKNNSKRVNAKSLIKYLSDNHKDLNAIEIVSGVEKGKSFNSTLKTYNDLKTIFSEELLDSEIYQKELEEIIKVITVFDDKKSIKNYLTKFFGHLEILDEEKINQLSKLRYSGWGRYSAKLLLDIRDEDTGFNLLQFLRNDEENRNLTKLISDNTLSFEPKIKDIQSKSTIEDDIFDEIKKLAGSPAIKRGILNSIKIVDELVQIIGYPPHNIVIEMARENMTTEEGQKKAKTRKTKLESALKNIENSLLENGKVPHSDEQLQSEKLYLYYLQNGKDMYTLDKTGSPAPLYLDQLDQYEVDHIIPYSFLPIDSIDNKVLTHRENNQQKLNNIPDKETVANMKPFWEKLYNAKLISQTKYQRLTTSERTPDGVLTESMKAGFIERQLVETRQIIKHVARILDNRFSDTKIITLKSQLITNFRNTFHIAKIRELNDYHHAHDAYLAVVVGQTLLKVYPKLAPELIYGHHAHFNRHEENKATLRKHLYSNIMRFFNNPDSKVSKDIWDCNRDLPIIKDVIYNSQINFVKRTMIKKGAFYNQNPVGKFNKQLAANNRYPLKTKALCLDTSIYGGYGPMNSALSIIIIAERFNEKKGKIETVKEFHDIFIIDYEKFNNNPFQFLNDTSENGFLKKNNINRVLGFYRIPKYSLMQKIDGTRMLFESKSNLHKATQFKLTKTQNELFFHMKRLLTKSNLMDLKSKSAIKESQNFILKHKEEFDNISNQLSAFSQKMLGNTTSLKNLIKGYNERKIKEIDIRDETIKYFYDNFIKMFSFVKSGAPKDINDFFDNKCTVARMRPKPDKKLLNATLIHQSITGLYETRIDLSKLGED

SEQ ID NO: 1295 - protein, 317 aa, Streptococcus sp.
FEDSILFSYQVDSKFNRKISDATIYATRKAKLDKEKSEETYVLGKIKDIYSQAGYDAFIKIYNKDKSKFLMYHKDPQTFEKVIEEILRTYPSKELNDKNKEIPCNPFEKYRQENGPIRKYSKKSNGPEIKSLKYYDNKLGNHIDITPESSDNQVVLQSLKPWRTDVYFNHQTKKYELMGLKYSDLSFEKGSGKYSISNQKYNSIKRIEGIDEQSEFKFTLYKNDLILIKDSENNEQKLFRFNSRNDTAKHYIELKPYDKAKFDGEQELITILGNVAKGGRCLKGLNKSNISIFKVKTDVLGKKHIIKKEGDEPKLKF

SEQ ID NO: 1296 - protein, 1420 aa, Streptococcus sp.
MAKFNKNYSIGLDIGVSSVGYAVVTEDYRVPAFKFKVLGNTEKEKIKKNLIGSTTFVPAQSAQGTRVFRVNRRRIDRRNHRIAYLRDIFQKEIEKIDKNFYRRLDESFRVLGDKSEDIQIKQPFFGNKELETAYHKKYPTIYHLRKHLADADKNSPVADIREVYMVLSHILKYRGHFLTLGKIDPNNINMQNSWIDFIESCQDAFDLEISDESKTIAAIFKSSENRQEKVKQILSYFQQELLKKDKSIFKQLLQLLFGLKTKFKDCFELEEEPDLNFSKENYDENLENLLGALEEDFSDVFAKLKILRDTILLSSMLTYTGATHARFSATMVERYEEHRKDLQRFKSFVKQNLSEQDYLDIFGRKTPTGFDVDKETKGYVGYISNKMVLTNPQKQKTIQQNFYDYISGKITGIEGAECFLNKISDGTFLRKLRTTDNGAIPNQIHAYELEKIIERQGRDYPFLLENKDKLLSILTFKIPYYVGPLAKGNNSRFAWIKRTTSQDVLDDNDEDTRNGKIRPWNYHKLINMDETRDAFIINLIGNDIILLNEKVLPKRSLIYEEVMLQNELTRVKYKDKYGKIHFFNSELRQEIINNLFKTNSKRVSSAMLLSYLENFTNLQAVEIVSGIEKGKSLNSTLKTYNDLKTIFSEELLDSEIYQKELEEIIKVITVFDDKKSIKNYLTKYFGHLEFLNEEKINQLSKLRYTGWGRYSGKLLLGIRDEDTGFNLMQFLRNDDENRNLTQLISDTTLSFDSAIKAIQSKSTVEDDVFEEIKNLAGSPAIKRGILNSIKIVDELVQIIGYPPQNIIIEMARENMTTEEGQKKAKTRKSKLESALKNIEDSVLESGKVPHSDEQLQSEKLYLYYLQNGKDMYSLDKTGSPTPLYRDQLDQYEVDHIIPYSFLPIDSIDNKVLTHRENNQRKLNNIPDKETVANMKPFWEKLYNAKLISQTKYQRLTTSERTPDGVLTESMKAGFIERQLVETRQIIKHVARILDNRFSDTKIITLKSQLVTNFRNTFHIAKIRELNDYHHAHDAYLAVVVGQTLLKAYPKLAPELIYGHHAHFNRHEENKATLRKHLYSNIMRFFNNPDSKVSKDIWDCNRDLPIVKDVIYNSQINFVKRTMIKKGAFYNQNPVGKLNKQIAANNRYPLKTKVSSLDTSIYGGYGPMNSALSIIIIAERFNEKKGKIETVKEFHDIFIIDYEKFNNNPFQFLNNVSEEGFLKKNDLNRVLAFYRISKYSLMQKIDGTRMLFESKSNLHKVTQFKLTKTQNELFFHMKRLLTKSNLMDLKSESAIKESQNFIQTHQNEFDNIADRLSNYSQKMLGETKSLQTLINGYNERPIKQIDNNEETIRYYYDNFIKMFSFVKSGAPKDIINFFNDKYTVPRMRPKPDRKMLDATLIHQSITGLYETRIDLSKLGED

SEQ ID NO: 1297 - protein, 1371 aa, Streptococcus sp.
MENKNYSIGLDIGTNSVGWSVITDDYKVPSKKMKVLGNTDKHFIKKNLIGALLFDEGTTAEARRLKRTARRRYTRRKNRLRYLQEIFSEEIGKVDSSFFHRLDDSFLIPEDKRGSKYPIFATLAEEKKYHKQFPTIYHLRKQLADSKEKTDLRLIYLALAHMIKYRGHFLYEEAFDIKNNDIQKIFNEFISIYNNTFEGNSLSGQNVQVEAIFTDKISKSAKRERVLKLFPDEKSTGLFSEFLKLIVGNQADFKKHFDLEEKAPLQFSRDTYDEDLENLLGQIGDDFADLFLVAKKLYDAILLSGILTVTNPSTKAPLSASMIERYENHQKDLASLKQFIKNNLPEKYDEVFSDQSEDGYAGYIDGKTTQETFYKYIKNLLSKFEGADYFLDKIEREDFLRKQRTFDNGSIPHQIHLQEMNAILRRQGEHYPFLKENKEKIEKILTFRIPYYVGPLARGNRDFAWLTRNSDQAIRPWNFEEIVDKASSAEDFINKMTNYDLYLPEEKVLPKHSLLYETFAVYNELTKVKFIAEGLRDYQFLDSGQKKQIVTQLFKEKRKVTEKDIIQFLHNVDGYDGIELKGIEKQFNASLSTYHDLLKIIKDKAFMDDAKNEAILENIVHTLTIFEDREMIKQRLAQYDSLFDEKVIKALTRRHYTGWGKLSAKLINGISDKQTGNTILDYLIDDGEINRNFMQLINDDGLSFKEIIQKAQVVGKTNDVKQVVQELPGSPAIKKGILQSIKIVDELVKVMGHAPESIVIEMARENQTTARGKKNSQQRYKRIEDSLKILASGLNSKILKEHPTDNIQLQNDRLFLYYLQNGKDMYTGEALDINQLSSCDIDHIIPQAFIKDDSLDNRVLTSSKDNRGKSDNVPSLEVVDKMKVFWQQLLDSKLISYRKFNNLTKAERGGLNELDKVGFIKRQLVETRQITKHVAQILDARFNKEVTEKDKKNRTVKIITLKSNLVSNFRKEFELYKVREINDYHHAHDAYLNAVVAKAILKKYPKLEPEFVYGDYQKYDLKRYISRSKDPKEIEKATEKYFFYSNLLNFFKEEVHYADGTIVKRENIEYSKDTGEIAWNKEKDFATIKKVLSLPQVNIVKKREVQTGGFSKESILPKGNSDKLIPRKTKDILWDTTKYGGFDSPVIAYSILLIADIEKGKAKKLKTVKTLVGITIMEKDAFEKNPIAFLENKGYHNVCKENILCLPKYSLFELENGRRRLLASAKELQKCNEIVLPVYLTTLLYHSKNVHKLDEPGHLEYIQKHRNEFKDLLNLVSEFSQKYVLADANLEKIKNLYADNEQADIEILANSFINLLTFTALGAPAAFKFFGKDVDRKRYTTVSEILNATLIHQSITGLYETRIDLSKLGED

SEQ ID NO: 1298 - protein, 93 aa, Streptococcus sp.
MILIKDSENNEQKLFRFNSRNDTAKHYVELKPYDKARFDGQQELITILGNVAKGGQCLKGLNKSNISIFKVKTDVLGKKHIIKKEGDEPKLKF

SEQ ID NO: 1299 - protein, 1121 aa, Streptococcus sp.
MNGLVLGLDIGIASVGVGILEKNSGKIIHANSRLFPAATADNNVERRKNRQARRLHRRKKHRGVRFQDLFEDYGLLTDFSKVSINLNPYRLRVDGLNQQLTNEELFIALKNIVKRRGISYLDDASEDGGTVSSDYGKAVEENRKLLAEQTPGQIQLERFEKYGQVRGDFTVVENGEKRRLINVFSTSAYRKEAERILRKQQEFNSKITDEFIEDCLKILTGKRKYYHGPGNEKSRTDYGRFRTDGTTLDNIFGILIGKCTFYPDEYRASKASYTAQEFNLLNDLNNLTVPTETKKLSEEQKKVIVEYAKEAKTLGASTLLKYIAKMIDASVDQIRGYRVDVNNKPEIHTFEAYRKMQSLETISVGELSRNVLDELAHILTLNTEREGIEEAINTKLKDSFSQDQVLELVQFRKNNSSLFSKGWHNFSLKLMMELIPELYETSEEQMTILTRLGKQKSKEISKRTKYIDEKELTEEIYNPVVAKSVRQAIKIINEATKKHGIFDNIVIEMARENNEEDAKKDYIKRQKANQDEKNAAMEKAAFQYNGKKELPDSIFHGQKELATKIRLWHQQGEKCLYTGKNIPISDLIHNQYKYEIDHILPLSLSFDDSLSNKVLVLATANQEKGQRTPFQALDSMDDAWSYREFKSYVKESKLLGNKKKEYLLTEEDISKIEVKQKFIERNLIDTRYSSRVVLNALQDFYKAHKFDTTISVVRGQFTSQLRRKWGLEKSRETYHHHAVDALIIAASSQLRLWKKQNNPLIAYKEGQFVDSETGEIISLSDDEYKELVFKAPYDHFVDTLSSKTFEDSILFSYQVDSKFNRKISDATIYATRKAKLDKEKSEETYVLGKIKDIYSQAGYDAFIKIYNKDKSKFLMYHKDPQTFEKVIEEILRTYPSKELNDKNKEIPCNPFEKYRQENGPIRKYSKKSNGPEIKSLKYYDNKLGNHIDITPESSDNQVVLQSLKPWRTDVYFNHQTKKYELMGLKYSDLSFEKGSGKYSISNQKYNSIKRIEGIDEQSEFKFTLYKNDLILIKDSENNEQKLFRFNSRNDTAKHYIELKPYDKAKFDGEQELITILGNVAKGGRCLKGLNKSNISIFKVKTDVLGKKHIIKKEGDEPKLKF

SEQ ID NO: 1300 - protein, 1026 aa, Streptococcus sp.
MNGLVLGLDIGIASVGVGILEKNSGKIIHANSRLFPAATADNNVERRKNRQARRLNRRKKHRGVRFQDLFEDYGLLTDFSKVSINLNPYRLRVDGLNQQLTNEELFIALKNIVKRRGISYLDDASEDGGAVSSDYGKAVEENRKLLAEQTPGQIQLERFEKYGQVRGDFTVVENGEKRRLINVFSTSAYRKEAEKILRKQQEFNNQITDEFIEDYLKILTGKRKYYHGPGNEKSRTDYGRFRTDGTTLDNIFGVLIGKCTFYPNEYRASKSSYTAQEFNLLNDLNNLTVPTETKKLSEEQKKVIVEYAKEAKTLGASTLLKYIVKMIDASVDQISGYRVDVNNKPEMHTFEVYRKMQSLETISVGELSRNVLDELAHILTLNTEREGIEEAINSKLMGVFSQDQVLELVQFRKNNSSLFSKGWHNFSLKLMMELIPELYETSEEQMTILTRLGKQKSKETSKRTKYIDEKELTEEIYNPVVAKSVRQAIKIINEATKKHGIFDNIVIEMARENNEEDAKKDYIKRQKANQDEKNAAMEKAAFQYNGKKELPGNIFNGHKELATKIRLWHQQGEKCLYTGKTIPISDLIHNQYKYEIDHILPLSLSFDDSLSNKVLVHATANQEKGQRTPFQALDSMDDAWSYREFKSYVKDLKSLSNKKKDYLLTEEDISKIEVKQKFIERNLVDTRYSSRVVLNALQDFYKSHQFDTTISVVRGQFTSQLRRKWGLEKSRETYHHHAVDALIIAASSQLRLWKKQNNPLITYKEGQFIDSQTGEIISLTDDEYKELVFKAPYDHFVDTLHSKTFEDGILFSYQVDSKYNRKISDATIYATRKAKLDKDKSEETYVLGKIKDIYSQAGYDAFIKIYNKDKRKFLMYHKDPQTFEKVIEEILRTYPSKERNDKNKEVPCNPFEKYRQENGPIRKYSKKGNGPEIKCLKYYDNKLGNYIDISPDGSDNQVVLQSLKPWRTDVYFNHQTKKYELMGLKYSDLSFEKGSGKYSISNEKYNSIKRIEGVNEQSEFKFTLYK

SEQ ID NO: 1301 - protein, 1377 aa, Streptococcus sp.
MNNKPYSIGLDIGTNSVGWSVITDDYKVPSKKMKVLGNTDKRFIKKNLIGALLFDEGTTAEARRLKRTARRRYTRRKNRLRYLQEIFAEEMSKVDSSFFHRLDDSFLIPEDKRGSKYPIFATLVEEKEYHKQFPTIYHLRKQLADSKEKADLRLIYLVLAHMIKYRGHFLYEEAFDIKNNDIQKIFNEFISIYDNTFEGSSLSGQNAQVETIFTDKISKSAKRERVLKLFPDEKSTGLFSEFLKLIVGNQADFKKHFDLEEKAPLQFSKDTYDEDLENLLEQIGDDFADLFVAAKKLYDAILLSGILTVTDPSTKAPLSASMIERYENHQKDLAVLKQFIKTNLPEKYVEVFSDQSKDGYAGYIDGKTTQEAFYKYIKNLLSKFDGADYFLDKIEREVFLRKQRTFDNGSIPHQIHLQEMNTILRRQGEHYPFLKENKEKIEKILTFRIPYHVGPLARGNRDFAWLTRNSDQAIRPWNFEEIVDKASSAEDFINKMTNYDLYLPEEKVLPKHSLLYETFAVYNELTKVKFIAEGMRDYQFLDSGQKKKIINQLFKKKRKVTEDDIIDCLQKIDNYDGIELKGIEKQFNASLSTYHDILKIIRDKEFMDDPKNGDILENVIHTLTIFEDREMIKQRLAQYNSIFDEKVIKALSRKHYTGWGKLSAKLIDGIRDKQTGKTILDYLMDDGKSNRNFMQLIKDDELSFTEIIQKAQVVGDTDNLRQVVQNLPGSPAIKKGILQSIKIVDELVKVMGHAPESIVIEMARENQTTARGKKNSQQRYKRIEDSLKNLASGLDSNILKENPTDNIQLQNDRLFLYYLQNGKDMYTGEALNINQLSSYDIDHIIPQAFIKDDSLDNRVLTSSKDNRGKSDNVPSLEVVEKMKAFWQQLLDSKLISERKYNNLTKAERERGGLNELDKVGFIKRQLVETRQITKHVAQILDARFNKEVTEKNKKNRNVKIITLKSNMVSNFRKEFGLYKVREINDYHHAHDAYLNAVVAKAILKKYPKLEPEFVYGDYQKYDLKRYISRSKDPKEVEKATEKYFFYSNLLNFFKEEVHYADGTIVKRENIEYSKDTGEIAWNKEKDFATIKKVLSLPQVNIVKKTEEQTVGQNGGLFDNNIVSKKKVVDASKLIPIKSGLSPEKYGGYARPTIAYSVLVTYKQNNKIKNTMVGIPVLTKLEFERDPNLYLRNLGINNVSHVIKLVKYTVLEFKHKYGTYRRFIVSNQELKRANQIFVTTKQMKLISQYTTLDKNEHDSLLKNNQQLIQSIWNQFLEFMLATDLVNKKQYDELILTNNQTIEECRNIMNRVITTLSFTNINAGQKKIIFDDTLSLPIKRWQFTDSDKMVKKIIESTLIHQSITGLYETRIDLSKLGED

SEQ ID NO: 1302 - protein, 1371 aa, Streptococcus sp.
MNNNNYSIGLDIGTNSVGWAVITDDYKVPSKKMRVLGNTDKRFIKKNLIGALLFDEGTTAEDRRLKRTARRRYTRRKNRLRYLQEIFAEEMSKVDSSFFHRLDDSFLVPEDKSGSKYPIFATLAEEKEYHKKFPTIYHLRKHLADSKEKADLRLIYLALAHITKYRGHFLYEEAFDIKNNDIQKIFNEFINIYDNTFEGSSLSGQNAQVEAIFTGKISKSVKREHVLKLFPDEKSTGLFSEFLKLIVGNQADFKKHFDLEEKASLQFSKDTYDEDLENLLGQIGDDFADLFLVAKKLYDAILLSGILTVTDPSTKAPLSASMIERYENHQEDLAALKQFIKNNLPEKYAEVFSDQSKDGYAGYIDGKTTQEAFYKYIKNLLSKFEGADYFLDKIEREDFLRKQRTFDNGSIPHQIHLQEMNAILRRQGEHYPLLKENKEKIEKILTFRIPYYVGPLARGNRDFAWLTRNSDQAIRPWNFEEIVDKASSAESFINKMTNYDLYLPEEKVLPKHSLLYETFAVYNELTKVKFIAEGLRDYQFFDSGQKKQIVNQLFKEKRKVTEKDIIHYLHNVDGYDGIELKGIEKQFNASLSTYHDLLKIIKDKEFMDNHKNQEILENIVHTLTIFEDREMIKQRLAQYDSIFDEKVIKALTRRHYTGWGKLSAKLINGICDKKTGKTILDYLIDDGYNNRNFMQLINDDGLSFKEIIQKAQVVGKTDDLTQVVRELSGSPAIKKGILQSIKIVDELVKIMGYAPESIVIEMARENQTTAKGKKNSQQRYKRIEDALKNLAPGLDSTISKENPTDNIQLQNDRLFLYYLQNGKDMYTGEALDINQLSSYDIDHIIPQAFIKDDSLDNRVLTSSKDNRGKSDNVPSLEVVKKRKAFWQQLLDSKLISERKFNNLTKAERGGLDERDKVGFIKRQLVETRQITKHVARILDARFNTEVSEKNQKIRSVKIITLKSNLVSNFRKEFKLYKVREINDYHHAHDAYLNAVVAKAILKKYPKLEPEFVYGDYQKYDLKRYISKSKDPKEVEKATEKYFFYSNLLNFFKEEVHYADGTIVKRENIEYSKDTGEIAWNKEKDFVTIKKVLSYPQVNIVKKREVQTGGFSKESILPKGNSDKLIPRKTKDILWDTTKYGGFDSPVIAYSILLIADIEKGKAKKLKTVKTLVGITIMEKAAFEKNPITFLENKGYHNVRKENILCLPKYSLFELENGRRRLLASAKELQKGNEIVLPVYLTTLLYHSKNVHKLDEPEHLEYIQKHRYEFKDLLNLVSEFSQKYVLAEANLEKIKSLYVDNEQADIEILANSFINLLTFTALGAPAAFKFFGKDVDRKRYTTVSEILNATLIHQSITGLYETRIDLSKLGED

SEQ ID NO: 1303 - protein, 1139 aa, Streptococcus sp.
MSDLVLGLDIGIGSVGVGILNKVTGEIIHKNSRIFPAAQAENNLERRTNRQGRRLTRRKKHRRVRLNHLFEESGLITDFTKVSINLNPYQLRVKGLTAELSNEELFIALKNMVKHRGISYLDDASDDGNSSVGDYAQIVKENSKQLETKTPGQIQLERYQKYGQLRGDFTVEEDGRKHRLINVFPTSAYHAEALRILQTQQEFNPQITDEFINSYLEILTGKRKYYHGPGNEKSRTDYGKYTTKKDAQGQYITLNNIFGILIGKCTFYPEEYRAAKASYTAQEFNLLNDLNNLTVPTETKKLSEEQKYQIITYVKNEKAMGPAKLFKYIAKLLSCDVADIKGYRIDKSDKAEIHTFEAYRKMKTLETLDVKKMAREELDKLAYVLTLNTEREGIQEALDHEFADGTFSQEQVDELVQFRKANSSIFGKGWHSFSVKLMMELIPELYATSEEQMTILTRLGKQKTTSSSNKTKYIDEKQLTEEIYNPVVAKSVRQAIKIVNAAIKKYGDFDNIVIEMARETNEDDEKKAIQKIQKANKAEKDAAMRKAANQYNGKAELPHSVFHGHKQLATKIRLWHQQGERCLYTGKTISIHDLINNPNQFEIDHILPLSITFDDSLANKVLVYATANQEKGQRTPYQALDSMDDAWSFRELKAFVRESKALSNKKKEYLLTEEDISKFDVRKKFIERNLVDTRYASRVVLNALQEHFRTHKIDTKVSVVRGQFTSQLRRHWGIEKTRDTYHHHAVDALIIAASSQLNLWKKQKNTLVSYSEDQLLDIETGELISDDEYKESVFKAPYQHFVDTLKSKEFEDSILFSYQVDSKFNRKISDATIYATRKAKLDKEKKEYTYTLGKIKDIYALGTKTPSKTGFYKFLDLYKKDKSQFLMYQKDRRTWDEVIEKILEQYRPFKEKDKNGKEVDFNPFEKYRIENGPIRKYSRKGNGPEIKSLKYYDNLLGRFVDITPSESKNPVALLSLNPWRTDVYYNTETRKYEFLGLKYADLCFEKGGSYGISKVKYNKIREKEGIGKNSEFKFTLYKNDLILIKDTETNRQQIFRFWSRTGKDNPKSFEKHKLELKPYEKTRFEKGEELKVLGKVPPSSNRLQKNMQIENLSIYKVRTDVLGNQHIIKNEGDKPKLDF

SEQ ID NO: 1304 - protein, 1375 aa, Streptococcus sp.
MSNKSYSIGLDIGTNSVGWAVITDDYKVPSKKMKVLGNTDKHFIKKNLIGALLFDEGTTAEDRRLKRTARRRYTRRKNRLRYLQEIFSQEISKVDSSFFHRLDDFFLVPEDKRGSKYPIFATLVEEKEYHKKFPTIYHLRKHLADSKEKTDLRLIYLALAHMIKYRGHFLYEESFDIKNNDIQKIFSEFISIYDNTFEGKSLSGQNAQVEAIFTDKISKSTKRERVLKLFPDEKSTGLFSEFLKLIVGNQADFKKHFDLEEKAPLQFSKDTYDEDLENLLGQIGDDFADLFLVAKKLYDAILLSGILTVKDLSTKAPLSASMIERYENHQKDLAALKQFIQNNLQEKYDEVFSDQSKDGYAGYIDGKTTQEAFYKYIKNLLSKFEGADYFLDKIEREDFLKKQRTFDNGSIPHQIHLQEMNAIIRRQGEHYPFLQENKEKIEKILTFRIPYYVGPLARGNGDFAWLTRNSDQAIRPWNFEEIVDQASSAEDFINKMTNYDLYLPEEKVLPKHSLLYETFAVYNELTKVKFIAEGLTRYQFLDKKQKKDIFDTFFKAENKRKVTEKDIIHYLHNVDGYDGIELKGIEKQFNASLSTYHDLLKIIKDKAFMDDSKNEEILENIIHTLTIFEDREMIKQRLAQYDSLFDEKVIKALTRRHYTGWGKLSAKLINGIRDKKSGKTILDYLIDDGEINRNFMQLIHDDGLSFKEIIQKAQVFGKTNDVKQVVQELPGSPAIKKGILQSIKIVDELVKVMGHAPESIVIEMARENQTTARGKKNSQQRYKRIEDSLKNLASGLDSNILKENPTDNIQLQNDRLFLYYLQNGRDMYTGKPLEINQLSNYDIDHIIPQAFIKDDSLDNRVLTSSKDNRGKSDNVPSLEVVEKMKAFWQQLLDSKLISERKFNNLTKAERERGGLNELDKVGFIKRQLVETRQITKHVAQFLDARFNKEVTEKDKKNRNVKIITLKSNLVSNFRKEFGLYKVREINDYHHAHDAYLNAVLAKAILKKYPKLEPEFVYGDYQKYDLQRYISKSREPKEVEKATQKYFFYSNLLNFFKEEVHYADGTIVKRENIEYSKDTGEIAWNKEKDFATVKKVLSLPQVNIVKKTEVQTGGFSKESILPKGNSDKLIPRKTKEILWDTTKYGGFDSPVIAYSILLIADIEKGKAKKLKTVKTLVGITIMEKATFEKNPITFLENKGYHNVRKENILCLPKYSLFELESGRRRMLASAKELQKGNEIVLPVYLTTLLYHSKNVHKLDEPEHLEYIQKHRYEFKDLLNLVSEFSQKYVLADANLEKIKNLYADNEQADIEILANSFINLLTFTALGAPAAFKFLGKDVDRKRYTTVSEILNATLIHQSITGLYETRIDLSKLGED

SEQ ID NO: 1305 - protein, 206 aa, Streptococcus sp.
RTPFQALDSMDDAWSYREFKSYVKESKLLGNKKKEYLLTEEDISKIEVKQKFIERNLIDTRYSSRVVLNALQDFYKAHKFDTTISVVRGQFTSQLRRKWGLEKSRETYHHHAVDALIIAASSQLRLWKKQNNPLIAYKEGQFVDSETGEIISLSDDEYKELVFKAPYDHFVDTLSSKTFEDSILFSYQVDSKFNRKISDATIYATR

SEQ ID NO: 1306 - protein, 1122 aa, Streptococcus suis
MSNGKILGLDIGIASVGVGVIDAQTGEIIHASSRIFPSANAANNAERRTFRGSRRLIRRKKHRIKRLDDLFNDFHINLDGEMSTDNPYVLRVKGLSQKLTVEELYISIKNIMKRRGISYLDDAESDNEAGRSDYAKAIERNRQLLTSKTPGEIQLERLEKYGQLRGNFTIIDEEGQSQQIINVFSTSDYVKEVEKILDCQKMYHKFISDEFCDKLIELLREKRKYYVGPGNEKSRTDYGIYRTDGTTLENLFGILIGKCTFYPDQYRSSRASYTAQEFNFLNDLNNLTVPTETKKLSQEQKEFLVNYAKETSVLGAGKILQQIAKLADCKVEDIRGYRLDNKDKPELHTFETYRAMKGLVPLVDIGVLSREQLDILADILTLNTDFEGIREALKKQLPNVFDEKQVKGLASFRKSKSQLFAKGWHNLSQKIMLEVIPELYATSDEQMTILTRLGKFEKSSVAEYPSSINVDEITDEIYNPVVAKSIRQTIKIINASIKKWDEFDQIVIEMPRDRNEDEEKKRIADGQKANAKEKADSILRAAELYCAGKVLPDYVYNGHNQLATKIRLWYQQGERCIYTGQPISIHDLIHNQNQYEIDHILPLSLTFDDSLSNKVLVLATANQEKAQRTPYNYLKSATSAWSYREFKDYVTKRKGIGKKKCEYLTFEEDINGFEVRSKFIQRNLVDTRYASKVILNALQDYFKISGIQTKVSVVRGQFTSQLRHKWGIEKTRETYHHHAVDALIIAASSQLRLWKKQESPLVVDYQEGRQVDLETGEILELTDEQYKELVYQPPYQGFVNTISSSAFDNEILFSYQVDSKVNRKISDATIYATRNAQLGKDKTEGIYVLGKIKDIYTQAGYEAFLKRYTKDKTSFLMYHKDLDTWEKVIEIILRDYREYDEKGKEIGNPFERYRRENGYVKKYSRKGNGTAIKSLKYYDNKLGNHIDITPENSRNAVVLQSLKPWRTDVYFNKETGKYEFLGIKYSDLSFEKGTGEYGISQEKYDSIKIAEGVAKKSIFKFTLYKQDLLFIKDIENNFGKLLRFTSKNDTSKHYVELKPYDKNKFGTEEPLLPVLGNVAKSGQCIKGLNKSNISIYKVRTDILGYRHFIKQEGEHPQLKFKK

SEQ ID NO: 1307 - protein, 1381 aa, Streptococcus suis
MVKKKYAIGIDIGTNSVGWSIVTDDYKVPSKKMKVFGNTEKRYIKKNLLGTLLFDEGNTAENRRLKRTARRRYTRRRNRILYLQEIFAEEINKIDDSFFQRLDDSFLIVEDKQGSKHPIFGTLQEEKEYHKQFPTIYHLRKQLADSSQKADIRLIYLALAHIIKYRGHFLFEGDLKSENKDVQHLFNDFVEMFDKTVEGSYLSENLPNVADVLVEKVSKSRRLENILHYFPNEKKNGLFGNFLALALGLQPNFKTNFELAEDAKIQFSKETYEEDLEELLGKIGDDYADLFIATKSLYDGILLAGILSTTDSTTKAPLSSSMVNRYEEHQKDLALLKNFIHQNLSDSYKEVFNDKLKDGYAGYIEGKTTQENFYRFIKKAIEKIEGSNYFIDKIDREDFLRKQRTFDNGSIPHQIHLQEMHAIIRRQAEFYPFLVENQDKIEKILTFRIPYYVGPLARGKSEFAWLNRKSDEKIRPWNFDEMVDKETSAENFITRMTNYDRYLPDQKVLPKHSLLYEKFAVYNELTKVKFIAEGMRDYQFLDSGQKKDIVKTLFKTKRKVTAKDIKAYLENSNGYAGVELKGLEEQFNASLPTYHDLLKILRDKAFIDAEENQEILEDIVLTLTLFEDREMIRKRLEKYKDILTEEQRKKLERRHYTGWGRLSAKLINGILDKVTRKTILGYLIDDGTSNRNFMQLINDDTLSFVDEIRLAQGSGEAEDYRAEVQNLAGSPAIKKGILQSLKIVDELIEVMGYEPEHIVVEMARENQFTNQGRRNSQQRINRLENALKDFGSKILEEQKPYGVSKVNNIHLQSDRLFLYYLQNGKDMYTDEELDIDHLSEYDIDHIIPQAFIKDDSLDNKVLTKSAKNRGKSDDVPSMEIVHNRKNFWRQLLKSKLISQRKFDNLTKAERGGLTNEDKARFIQRQLVETRQITKHVARMLDTRFNTKLDEAGNRIRDPKVNIITLKSNLVSQFRKDYQLYKIREINNYHHAHDAYINAVVATALLKKYPQLAPEFVYGEYPTYNSYNSRKSATEKVLFYSNIMNFFKRIVVHSKTGEVRIRPVIEVNKETGEIVWDKKSDFRTVRKVLSYPQVNVVKKTEVQNHGLDRGKPKGFYNANLSPRPKEGSVENLVPAKQSFDTKRYGGYAGISNSYAVLVNGIIEKGKKKSKAEVTEFQGISILARKDFDKNPKQYLLNLGYKDIKSIIKLPKYSLFELENGSRRMLASILSTNNKRGEIHKGNEMYLPDKFVTLLYHAMRVNRTLEPGHKKYVETHRHVFDELLIYILEYNEKIVGAKANGKRIVEAYSARKDTDNLEELCNSFINLLNLTALGSAVDFEFLGTKIPRYRDYTPSSLLKATLIHQSVTGLYETRIDLSKLGGD

SEQ ID NO: 1308 - protein, 39 aa, Streptococcus thermophilus
GRCIKGLGKSNISIYKVRTDVLGNQHIIKNEGDKPKLDF

SEQ ID NO: 1309 - protein, 302 aa, Streptococcus thermophilus
MIRRKKHRIVRLNRLFEESGLITDFTKISINLNPYQLRVKGLTDELSNEELFIALKNMVKHRGISYLDDASDDGNSSVGDYAQIVKENSKQLETKTPGQIQLERYQTYGQLRGDFTVEKDGKKHRLINVFPTSAYRSEALRILQTQQEFNPQITDEFINRYLEILTGKRKYYHGPGNEKSRTDYGRYRTSGETLDNIFGILIGKCTFYPDEFRAAKASYTAQEFNLLNDLNNLTVPTETKKLSKEQKNQIINYVKNEKAMGPAKLFKYIAKLLSCDVADIKGYRIDKSGKAERFILSKPIEK

SEQ ID NO: 1310 - protein, 1121 aa, Streptococcus thermophilus
MSDLVLGLDIGIGSVGVGILNKVTGEIIHKNSRIFPAAQAENNLVRRTNRQGRRLTRRKKHRIVRLNRLFEESGLITDFTKISINLNPYQLRVKGLTDELSNEELFIALKNMVKHRGISYLDDASDDGNSSVGDYAQIVKENSKQLETKTPGQIQLERYQTYGQLRGDFTVEKDGKKHRLINVFPTSAYRSEALRILQTQQEFNPQITDEFINRYLEILTGKRKYYHGPGNEKSRTDYGRYRTSGETLDNIFGILIGKCTFYPDEFRAAKASYTAQEFNLLNDLNNLTVPTETKKLSKEQKNQIINYVKNEKAMGPAKLFKYIAKLLSCDVADIKGYRIDKSGKAEIHTFEAYRKMKTLETLDIEQMDRETLDKLAYVLTLNTEREGIQEALEHEFADGSFSQKQVDELVQFRKANSSIFGKGWHNFSVKLMMELIPELYETSEEQMTILTRLGKQKTTSSSNKTKYIDEKLLTEEIYNPVVAKSVRQAIKIVNAAIKEYGDFDNIVIEMARETNEDDEKKAIQKIQKANKDEKDAAMLKAANQYNGKAELPHSVFHGHKQLATKIRLWHQQGERCLYTGKTISIHDLINNSNQFEVDHILPLSITFDDSLANKVLVYATANQEKGQRTPYQALDSMDDAWSFRELKAFVRESKTLSNKKKEYLLTEEDISKFDVRKKFIERNLVDTRYASRVVLNALQEHFRAHKIDTKVSVVRGQFTSQLRRHWGIEKTRDTYHHHAVDALIIAASSQLNLWKKQKNTLVSYSEDQLLDIETGELISDDEYKESVFKAPYQHFVDTLKSKEFEDSILFSYQVDSKFNRKISDATIYATRQAKVGKDKADETYVLGKIKDIYTQDGYDAFMKIYKKDKSKFLMYRHDPQTFEKVIEPILENYPNKQMNEKGKEVPCNPFLKYKEEHGYIRKYSKKGNGPEIKSLKYYDSKLGNHIDITPKDSNNKVVLQSVSPWRADIYFNNTTGKYEILGLKYADLQFEKGTGTYKISQEKYNDIKKKEGVDSDSEFKFTLYKNDLLLVKETETKEQQLFRFLSRTMPKQKHYVELKPYDKQKFEGGEALIKVLGNVANGGQCIKGLGKSNISIYKVRTDVLGNQHIIKNEGDKPKLDF

SEQ ID NO: 1311 - protein, 1121 aa, Streptococcus thermophilus
MSDLVLGLDIGIGSVGVGILNKVTGEIIHKNSRIFPAAQAENNLVRRTNRQGRRLTRRKKHRIVRLNRLFEESGLITDFTKISINLNPYQLRVKGLTDELSNEELFIALKNMVKHRGISYLDDASDDGNSSVGDYAQIVKENSKQLETKTPGQIQLERYQTYGQLRGDFTVEKDGKKHRLINVFPTSAYRSEALRILQTQQEFNPQITDEFINRYLEILTGKRKYYHGPGNEKSRTDYGRYRTSGETLDNIFGILIGKCTFYPDEFRAAKASYTAQEFNLLNDLNNLTVPTETKKLSKEQKNQIINYVKNEKAMGPAKLFKYIAKLLSCDVADIKEYRIDKSGKAEIHTFEAYRKMKTLETLDIEQMDRETLDKLAYVLTLNTEREGIQEALEHEFADGSFSQKQVDELVQFRKANSSIFGKGWHNFSVKLMMELIPELYETSEEQMTILTRLGKQKTTSSSNKTKYIDEKLLTEEIYNPVVAKSVRQAIKIVNAAIKEYGDFDNIVIEMARETNEDDEKKAIQKIQKANKDEKDAAMLKAANQYNGKAELPHSVFHGHKQLATKIRLWHQQGERCLYTGKTISIHDLINNSNQFEVDHILPLSITFDDSLANKVLVYATANQEKGQRTPYQALDSMDDAWSFRELKAFVRESKTLSNKKKEYLLTEEDISKFDVRKKFIERNLVDTRYASRVVLNALQEHFRAHKIDTKVSVVRGQFTSQLRRHWGIEKTRDTYHHHAVDALIIAASIQLNLWKKQKNTLVSYSEDQLLDIETGELISDDEYKESVFKAPYQHFVDTLKSKEFEDSILFSYQVDSKFNRKISDATIYATRQAKVGKDKADETYVLGKIKDIYTQDGYDAFMKIYKKDKSKFLMYRHDPQTFEKVIEPILENYPNKQINEKGKEVPVNPFLKYKEEHGYIRKYSKKGNGPEIKSLKYYDSKLGNHIDITPKDSNNKVVLQSVSPWRADVYFNKTTGKYEILGLKYADLQFEKGTGTYKISQEKYNDIKKKEGVDSDSEFKFTLYKNDLLLVKDTETKEQQLFRFLSRTMPKQKHYVELKPYDKQKFEGGEALIKVLGNVANSGQCKKGLGKSNISIYKVRTDVLGNQHIIKNEGDKPKLDF

SEQ ID NO: 1312 - protein, 1121 aa, Streptococcus thermophilus
MSDLVLGLDIGIGSVGVGILNKVTGEIIHKNSRIFPAAQAENNLVRRTNRQGRRLTRRKKHRRVRLNRLFEESGLITDFTKISINLNPYQLRVKGLTDELSNEELFIALKNMVKHRGISYLDDASDDGNSSVGDYAQIVKENSKQLETKTPGQIQLERYQTYGQLRGDFTVEKDGKKHRLINVFPTSAYRSEALRILQTQQEFNPQITDEFVNRYLEILTGKRKYYHGPGNEKSRTDYGRYRTNGETLDNIFGILIGKCTFYPEEFRAAKASYTAQEFNLLNDLNNLTVPTETKKLSKEQKNQIINYVKNEKAMGPAKLFKYIAKLLSCDVADIKGYRIDKSGKAEIHTFEAYRKMKTLETLDIEQMDRETLDKLAYVLTLNTEREGIQEALEHEFADGSFSQKQVDELVQFRKANSSIFGKGWHNFSVKLMMELIPELYETSEEQMTILKRLGKQKTTSSSNKTKYIDEKLLTEEIYNPVVAKSIRQAIKIVNAAIKEYGDFDNIVIEMARETNEDDEKKAIQKIQKANKDEKDAAMLKAANQYNGKAELPHSVFHGHKQLATKIRLWHQQGERCLYTGKTISIHDLINNPNQFEVDHILPLSITFDDSLANKVLVYATANQEKGQRTPYQALDSMDDAWSFRELKAFVRESKTLSNKKKEYLLTEEDISKFDVRKKFIERNLVDTRYASRVVLNALQEHFRAHKIDTKVSVVRGQFTSQLRRHWGIEKTRDTYHHHAVDALIIAASSQLNLWKKQKNTLVSYSEDQLLDIETGELISDDEYKESVFKAPYQHFVDTLKSKEFEDSILFSYQVDSKFNRKISDATIYATRQAKVGKDKKDETYVLGKIKDIYTQDGYDAFMKIYKKDKSKFLMYRHDPQTFEKVIEPILENYPNKEMNEKGKEVPCNPFLKYKEEHGYIRKYSKKGNDPEIKSLKYYDSKLGNHIDITPKDSNNKVVLQSVSPWRADVYFNKTTGKYEILGLKYADLQFEKGTGTYKISQEKYNDIKKKEGVDSDSEFKFTLYKNDLLLVKDTETKEQQLFRFLSRTMPKQKHYVELKPYDKQKFEGGEALIKVLGNVANSGQCKKGLGKSNISIYKVRTDVLGNQHIIKNEGDKPKLDF

SEQ ID NO: 1313 - protein, 1122 aa, Streptococcus thermophilus
MSDLVLGLDIGIGSVGVGILNKVTGEIIHKNSRIFPAAQAENNVERRTNRQGRRLTRRKKHRRVRLNRLFEESGLITDFTKISINLNPYQLRVRGLTDELSNEELFIALKNMVKHRGISYLDDASDDGNSSVGDYAQIVKENSKQLETKTPGQIQLERYQTYGQLRGDFTVEKDGKKHRLINVFPTSAYRSEALRILQTQQEFNSQITDEFINRYLEILTGKRKYYHGPGNEKSRTDYGRYRTSGETLDNIFGILIGKCTFYPEEFRAAKASYTAQEFNLLNDLNNLTVPTETKKLSKEQKNQIINYVKNEKAMGPAKLFKYIAKLLSCDVADIKGYRIDKSGKAEIHTFEAYRKMKTLETLDIEQMDRETLDKLAYVLTLNTEREGIQEALEHEFADGSFSQKQVDELVQFRKASSSIFGKGWHNFSVKLMMELIPELYETSEEQMTILTRLGKQKTTSSSNKTKYIDEKLLTEEIYNPVVAKSVRQAIKIVNAAIKEYGDFDNIVIEMARETNEDDEKKAIQKIQKANKDEKDAAMLKAANQYNGKAELPHSVFHGHKQLATKIRLWHQQGERCLYTGKTISIHDLINNPNQFEVDHILPLSITFDDSLANKVLVYATANQEKGQRTPYQALDSMDDAWSFRELKAFVRESKTLSNKKKEYLLTEEDISKFDVRKKFIERNLVDTRYASRVVLNALQEHFRAHKIDTKVSVVRGQFTSQLRRHWGIEKTRDTYHHHAVDALIIAASSQLNLWKKQKNTLVSYSEDQLLDIETGELISDDEYKESVFKAPYQHFVDTLKSKEFEDSILFSYQVDSKFNRKLSDATIYATRQAKVGKDKKDETYVLGKIKDIYTQDGYDAFMKIYKKDKSKFLMYRHDPQTFEKVIEPILENYPNKEMNEKGKEVPCNPFLKYKEEHGYIRKYSKKGNGPEIKSLKYYDSKLLGNPIDITPENSKNKVVLQSLKPWRADVYFNKTTGKYEILGLKYADLQFEKKTGTYKISQEKYNGIMKEEGVDSDSEFKFTLYKNDLLLVKDTETKEQQLFRFLSRTMPNVKYYVELKPYSKDKFEKNESLIEILGSADKSGRCIKGLGKSNISIYKVRTDVLGNQHIIKNEGDKPKLDF

SEQ ID NO: 1314 - protein, 1388 aa, Streptococcus thermophilus
MTKPYSIGLDIGTNSVGWAVITDNYKVPSKKMKVLGNTSKKYIKKNLLGVLLFDSGITAEGRRLKRTARRRYTRRRNRILYLQEIFSTEMATLDDAFFQRLDDSFLVPDDKRDSKYPIFGNLVEEKAYHDEFPTIYHLRKYLADSTKKADLRLVYLALAHMIKYRGHFLIEGEFNSKNNDIQKNFQDFLDTYNAIFESDLSLENSKQLEEIVKDKISKLEKKDRILKLFPGEKNSGIFSEFLKLIVGNQADFRKCFNLDEKASLHFSKESYDEDLETLLGYIGDDYSDVFLKAKKLYDAILLSGFLTVTDNETEAPLSSAMIKRYNEHKEDLALLKEYIRNISLKTYNEVFKDDTKNGYAGYIDGKTNQEDFYVYLKNLLAEFEGADYFLEKIDREDFLRKQRTFDNGSIPYQIHLQEMRAILDKQAKFYPFLAKNKERIEKILTFRIPYYVGPLARGNSDFAWSIRKRNEKITPWNFEDVIDKESSAEAFINRMTSFDLYLPEEKVLPKHSLLYETFNVYNELTKVRFIAESMRDYQFLDSKQKKDIVRLYFKDKRKVTDKDIIEYLHAIYGYDGIELKGIEKQFNSSLSTYHDLLNIINDKEFLDDSSNEAIIEEIIHTLTIFEDREMIKQRLSKFENIFDKSVLKKLSRRHYTGWGKLSAKLINGIRDEKSGNTILDYLIDDGISNRNFMQLIHDDALSFKKKIQKAQIIGDEDKGNIKEVVKSLPGSPAIKKGILQSIKIVDELVKVMGGRKPESIVVEMARENQYTNQGKSNSQQRLKRLEKSLKELGSKILKENIPAKLSKIDNNALQNDRLYLYYLQNGKDMYTGDDLDIDRLSNYDIDHIIPQAFLKDNSIDNKVLVSSASNRGKSDDFPSLEVVKKRKTFWYQLLKSKLISQRKFDNLTKAERGGLLPEDKAGFIQRQLVETRQITKHVARLLDEKFNNKKDENNRAVRTVKIITLKSTLVSQFRKDFELYKVCEINDFHHAHDAYLNAVIASALLKKYPKLEPEFVYGDYPKYNSFRERKSATEKVYFYSNIMNIFKKSISLADGRVIERPLIEVNEETGESVWNKESDLATVRRVLSYPQVNVVKKVEEQNHGLDRGKPKGLFNANLSSKPKPNSNENLVGAKEYLDPKKYGGYAGISNSFAVLVKGTIEKGAKKKITNVLEFQGISILDRINYRKDKLNFLLEKGYKDIELIIELPKYSLFELSDGSRRMLASILSTNNKRGEIHKGNQIFLSQKFVKLLYHAKRISNTINENHRKYVENHKKEFEELFYYILEFNENYVGAKKNGKLLNSAFQSWQNHSIDELCSSFIGPTGSERKGLFELTSRGSAADFEFLGVKIPRYRDYTPSSLLKDATLIHQSVTGLYETRIDLAKLGEG

SEQ ID NO: 1315 - protein, 1388 aa, Streptococcus thermophilus
MTKPYSIGLDIGTNSVGWAVITDNYKVPSKKMKVLGNTSKKYIKKNLLGVLLFDSGITAEGRRLKRTARRRYTRRRNRILYLQEIFSTEMATLDDAFFQRLDDSFLVPDDKRDSKYPIFGNLVEEKAYHDEFPTIYHLRKYLADSTKKADLRLVYLALAHMIKYRGHFLIEGEFNSKNNDIQKNFQDFLDTYNAIFESDLSLENSKQLEEIVKDKISKLEKKDRILKLFPGEKNSGIFSEFLKLIVGNQADFRKCFNLDEKASLHFSKESYDEDLETLLGYIGDDYSDVFLKAKKLYDAILLSGFLTVTDNETEAPLSSAMIKRYNEHKEDLALLKEYIRNISLKTYNEVFKDDTKNGYAGYIDGKTNQEDFYVYLKNLLAEFEGADYFLEKIDREDFLRKQRTFDNGSIPYQIHLQEMRAILDKQAKFYPFLAKNKERIEKILTFRIPYYVGPLARGNSDFAWSIRKRNEKITPWNFEDVIDKESSAEAFINRMTSFDLYLPEEKVLPKHSLLYETFNVYNELTKVRFIAESMRDYQFLDSKQKKDIVRLYFKDKRKVTDKDIIEYLHAIYGYDGIELKGIEKQFNSSLSTYHDLLNIINDKEFLDDSSNEAIIEEIIHTLTIFEDREMIKQRLSKFENIFDKSVLKKLSRRHYTGWGKLSAKLINGIRDEKSGNTILDYLIDDGISNRNFMQLIHDDALSFKKKIQKAQIIGDEDKGNIKEVVKSLPGSPAIKKGILQSIKIVDELVKVMGGRKPESIVVEMARENQYTNQGKSNSQQRLKRLEKSLKELGSKILKENIPAKLSKIDNNALQNDRLYLYYLQNGKDMYTGDDLDIDRLSNYDIDHIIPQAFLKDNSIDNKVLVSSASNRGKSDDFPSLEVVKKRKTFWYQLLKSKLISQRKFDNLTKAERGGLLPEDKAGFIQRQLVETRQITKHVARLLDEKFNNKKDENNRAVRTVKIITLKSTLVSQFRKDFELYKVREINDFHHAHDAYLNAVIASALLKKYPKLEPEFVYGDYPKYNSFRERKSATEKVYFYSNIMNIFKKSISLADGRVIERPLIEVNEETGESVWNKESDLATVRRVLSYPQVNVVKKVEEQNHGLDRGKPKGLFNANLSSKPKPNSNENLVGAKEYLDPKKYGGYAGISNSFAVLVKGTIEKGAKKKITNVLEFQGISILDRINYRKDKLNFLLEKGYKDIELIIELPKYSLFELSDGSRRMLASILSTNNKRGEIHKGNQIFLSQKFVKLLYHAKRISNTINENHRKYVENHKKEFEELFYYILEFNENYVGAKKNGKLLNSAFQSWQNHSIDELCSSFIGPTGSERKGLFELTSRGSAADFEFLGVKIPRYRDYTPSSLLKDATLIHQSVTGLYETRIDLAKLGEG

SEQ ID NO: 1316 - protein, 595 aa, Streptococcus thermophilus
MVQFRKANSSIFGKGWHNFSVKLMMELIPELYETSEEQMTILKRLGKQKTTSSSNKTKYIDEKLLTEEIYNPVVAKSVRQAIKIVNAAIKEYGDFDNIVIEMARETNEDDEKKAIQKIQKANKDEKDAAMLKAANQYNGKAELPHSVFHGHKQLATKIRLWHQQGERCLYTGKTISIHDLINNPNQFEVDHILPLSITFDDSLANKVLVYATANQEKGQRTPYQALDSMDDAWSFRELKAFVRESKTLSNKKKEYLLTEEDISKFDVRKKFIERNLVDTRYASRVVLNALQEHFRAHKIDTKVSVVRGQFTSQLRRHWGIEKTRDTYHHHAVDALIIAASSQLNLWKKQKNTLVSYSEDQFLDIETGELISDDEYKESVFKAPYQHFVDTLKSKEFEDSILFSYQVDSKFNRKISDATIYATRKAKLDKEKKEYTYTLGKIKDIYTQAGYDAFIKIYKKDKSKFLMYHHDPQTFEKVIEPILENYPNKEINEKGKEVPCNPFLKYKEEHGYIRKYSKKGNGPEIKSFKYYDNLLGRHIDITPKNSKNIVALRKLNPWRTDVYFNHETMKYEFLGLKYADISYKKSKNKAGDFLPK

SEQ ID NO: 1317 - protein, 1388 aa, Streptococcus thermophilus]
MTKPYSIGLDIGTNSVGWAVITDNYKVPSKKMKVLGNTSKKYIKKNLLGVLLFDSGITAEGRRLKRTARRRYTRRRNRILYLQEIFSTEMATLDDAFFQRLDDSFLVPDDKRDSKYPIFGNLVEEKVYHDEFPTIYHLRKYLADSTKKADLRLVYLALAHMIKYRGHFLIEGEFNSKNNDIQKNFQDFLDTYNAIFESDLSLENSKQLEEIVKDKISKLEKKDRILKLFPGEKNSGIFSEFLKLIVGNQADFRKCFNLDEKASLHFSKESYDEDLETLLGYIGDDYSDVFLKAKKLYDAILLSGFLTVTDNETEAPLSSAMIKRYNEHKEDLALLKEYIRNISLKTYNEVFKDDTKNGYAGYIDGKTNQEDFYVYLKNLLAEFEGADYFLEKIDREDFLRKQRTFDNGSIPYQIHLQEMRAILDKQAKFYPFLAKNKERIEKILTFRIPYYVGPLARGNSDFAWSIRKRNEKITPWNFEDVIDKESSAEAFINRMTSFDLYLPEEKVLPKHSLLYETFNVYNELTKVRFIAESMRDYQFLDSKQKKDIVRLYFKDKRKVTDKDIIEYLHAIYGYDGIELKGIEKQFNSSLSTYHDLLNIINDKEFLDDSSNEAIIEEIIHTLTIFEDREMIKQRLSKFENIFDKSVLKKLSRRHYTGWGKLSAKLINGIRDEKSGNTILDYLIDDGISNRNFMQLIHDDALSFKKKIQKAQIIGDEDKGNIKEVVKSLPGSPAIKKGILQSIKIVDELVKVMGGRKPESIVVEMARENQYTNQGKSNSQQRLKRLEKSLKELGSKILKENIPAKLSKIDNNALQNDRLYLYYLQNGKDMYTGDDLDIDRLSNYDIDHIIPQAFLKDNSIDNKVLVSSASNRGKSDDFPSLEVVKKRKTFWYQLLKSKLISQRKFDNLTKAERGGLLPEDKAGFIQRQLVETRQITKHVARLLDEKFNNKKDENNRAVRTVKIITLKSTLVSQFRKDFELYKVREINDFHHAHDAYLNAVIASALLKKYPKLEPEFVYGDYPKYNSFRERKSATEKVYFYSNIMNIFKKSISLADGRVIERPLIEVNEETGESVWNKESDLATVRRVLSYPQVNVVKKVEEQNHGLDRGKPKGLFNANLSSKPKPNSNENLVGAKEYLDPKKYGGYAGISNSFAVLVKGTIEKGAKKKITNVLEFQGISILDRINYRKDKLNFLLEKGYKDIELIIELPKYSLFELSDGSRRMLASILSTNNKRGEIHKGNQIFLSQKFVKLLYHAKRISNTINENHRKYVENHKKEFEELFYYILEFNENYVGAKKNGKLLNSAFQSWQNHSIDELCSSFIGPTGSERKGLFELTSRGSAADFEFLGVKIPRYRDYTPSSLLKDATLIHQSVTGLYETRIDLAKLGEG

SEQ ID NO: 1318 - protein, 1038 aa, Streptococcus vestibularis
MIDELSNEELFIALKNMVKHRGISYLDDASDDGNSSVGDYAQIVKENSKQLETKTPGQIQLERYQKYGQLRGDFTVEEDGKKHRLINVFPTSAYRAEALRILQTQQEFNSQITDEFINRYLEILTGKRKYYHGPGNEKSRTDYGRYRTSGETLDNIFGILIGKCTFYPEEFRAAKASYTAQEFNLLNDLNNLTVPTETKKLSEEQKNQIINYVKNEKAMGPAKLFKYIAKLLSCDIADIKGYRIDKSDKAEIHTFEAYRKMKTLETIDIEKMSREELDKLAYVLTLNTEREGIQEALEHEFVDGNFSQEQIDELVQFRKANSSIFGKGWHNFSVKLMMELIPELYATSEEQMTILTRLGKQKTTSSSNKTKYIDEKLLTEEIYNPVVAKSVRQAIKIVNAAIKEYGDFDNIVIEMARATNEDDEKKAIQKIQKANKDEKDAAMLKAANQYNGKAELPHSVFHGHKQLATKIRLWHQQGERCLYTGKTISIHDLINNPNQFEIDHILPLSITFDDSLANKVLVYATANQEKGQRTPYQALDSMDDAWSFRELKAFVRESKTLSNKKKEYLLTEEDISKFDVRKKFIERNLVDTRYASRVVLNALQEHFRAHKIDTKVSVVRGQFTSQLRRHWGIEKTRDTYHHHAVDALIIAASSQLNLWKKQKNTLVNYSENQLLDIETGELISDDEYKESVFKAPYQHFVDTLKSKEFEDSILFSYQVDSKFNRKISDATIYATRKAKLDKEKKEYTYTLGKIKDIYALGTKTPSKTGFYKFLDLYKKNKSQFLMYQKDRKTWDEVIEKILEQYRPFKEKDKNGKEVDFNPFEKYRIENGPIRKYSRKGNGPEIKSLKYYDNLLGRFVDITPSESKNPVALLSLNPWRTDVYYNTETRKYEFLGLKYADLCFEKGGSYGISKVKYNKIREKEGIGKNSEFKFTLYKNDLILIKDTETNRQQVFRFWSRTGKDNPKRFEKHKIELKPYEKARFEKGEELEVLGKVPPSSNQLQKNMQIENLSIFKVRTDVLGNQHIIKNEGDKPKLDF

SEQ ID NO: 1319 - protein, 97 aa, Streptococcus vestibularis
MSDLVLGLDIGIGSVGVGILNKVTGEIIHKNSRIFPAAQAENNVERRTNRQGRRLTRRKKHRRVRLNHLFEESGLITDFTKVSINLNPYQLRVKIDR

SEQ ID NO: 1320 - protein, 1084 aa, Subdoligranulum sp.
MKNTLYGIGLDIGVASVGWAVVGLNGTGEPVGLHRLGVRIFDKAEQPKTGESLAAPRRMARGMRRRLRRKALRRADVYALLERSGLSTREELAQMFEAGGLEDIYALRTRALDEPVGKAEFSRILLHLAQRRGFKSNRRTASDGEDGRLLAAVNENRRRMAQGGWRTVGEMLYRHEAFALHKRNKADDYLSTVGRDMVAEEASILFERQRAMGCSWAAPELQAEYLSILLRQRSFDEGPGGNSPYGGNQVEKMVGRCTFEPDEPRAAKAAYSFEYFSLLQKLNHIRLAENGETRPLTQPQRQQLLSLAHKTPDISLARIRKELALPETVQFNGVRCRANETLEESEKKEKFACLPAYHKMRKALDGVVKGRISSLSISQRDAAATALSLYKNEDTLRAKLTEAGFQAPEIDALAGLTGFSKFGHLSLKACRKLIPHLEQGLTYDQACTAAGYDFKGHGAGERAFTLPAAAPEMEQITSPVVRRAVAQTIKVVNGIIREMDASPAWVRIELARELSKTFGERQEMDRSMRENAAQNERLMQELRDTFHLLSPTGQDLVKYRLWKEQDGVCAYSLRRLDVERLFEPGYVDVDHIVPYSLSFDDRRSNKVLVLSSENRQKGNRLPLQYLQGKRREDFIVWTNSSVHDYRKRQNLLREKLSGDEAEGFRQRNLQDTQHMARFLYNYISDHLAFAQSEALGKKRVFAVSGAVTSHLRKRWGLSKVRADGDLHHALDAAVVACTTDGMIRRISGYYGHIEGEYLQDADGAGSQHARTKERFPAPWPRFRDELIVRLSEQPAEPLLDINPEFYCEYGTEHIRPVFVSRMPRRKVTGPGHKETIKGAAAADEGLLTVRKALTELKLDKDGEIKDYYMPSSDTLLYEALKAQLRRFGGDGKKAFAEPFYKPKADGTPGPLVRKVKTTEKATLTVPVHGGAASNDTMVRVDVFLVPGDGYYWVPVYTADTLKPELPNRAVVQGKPYSEWKEMREEDFIFSLYPNDLVYVEHKSGLKFTLQNADSTLEKTRTQTSAFAYFVSGSISTASITIRTHDNAYGIPSLGVKTLKTFHKYQVDVLGNVFPVHKETRQKFR

SEQ ID NO: 1321 - protein, 951 aa, Sutterella parvirubra
MPTVRPVFHSSASFDLGAKNTGLFLVNHPAGAAPSAEYAAAYTIVQPADGDGLNYSTTNRRAVRHRLRGGKRFKLARRLVLQVIDALRKLKPGLIRDEEMRRTVEALSSLLKRRGFTRIESEAQVDPTTLDSVDPAVFADHETLGGFFSLGIPISTQWDALSQNPGAVEQLFKALPSAKDFGKYVTEQFPEFAEQKKLYADAIKVLSSEAKSIVMQLGLGHHHRSKYFEMIAHDMLRDPRLQGVFELFGSEERFKTFICNVSNLQLRALRWYFDEPNPEVANQWNPEKFQVVWLRGLKYFHPDAERKADMKKLIDELTASKDILDALCTTDPRRTIPPYEDQNNRRPPFDQTLWLSAAELTRRYGDKWRIWSQKFERADRALSTGLDEILLYTDRRSRMFNRNQDPSVYADSYVLQRVLDRSSKLDRYALRALAAGYRTQELHEPLATLSDTLGTQHVETFLTFAAEYYEEVAAAKNGLWLDGPSRLLERADIHPPMKKKVLDLLLGNILDATPEIGRILRTVLWNRHVHEKSRSTPASLCRSIEAIRKDFGGEFRMRYDALDAKIRAAEDQKKKFKPTNAEEKDLFKAWNATKTMHAFLRDVLQLTPKQLERTASPYVFAQLHTLIDTERDGFTSTSLAAHLENHWRMRANAAGMAQCSRLPADAVRPFDGVLSKALDRQAFEAAKLAAQHLMSRKELTDTDIRYSIIIESNRFAFSASTAELKKNTLAKKNAEKGLNFELKRWQDKDSRIREASRGICAYTGAKLGDVVEYDHIIPRAFTTSAMGSVFNSEANLICVSRPGNQTKADKRYGLNKLHKTYLTAVFGTADVTTIAASIEDIVGKLASANRLRHFELLNEKEQDAVRHALFLDDESDARRIVLRELAAQNKSRVNGTQAWFVRAFMTKLLEITKDWRERTGNTLDIRSWKTDAEVASRLRSALNFHAEITLT

SEQ ID NO: 1322 - protein, 406 aa, Sutterella parvirubra
SNLFREEVPYGDHFLPIIQMKNRIYIGYQLPKADGTGGNAVAVLGKDPLELLETLKPFLDREPQAFSDHPVTYKMINERAYELLTKCALTPDQTTELERTQAEVLRSLNYQTSRAAVLGRLVDDKNKFVAKDAVWKEKDFVISFKLSPKKSAFKASGQLELPAKSDWKALVDSPELAINWGQPADDTFSQRIERKVRMNSSHLEHTPKKRVVSLPVVDKPSGGFRIRRHNLDGSAVFQVHTVANNKYGGFSADSAGKVDWSTPVLCGHLQHANLVPLDPETASAEQLVRMSEWRVVETTSDIRLEVCPGTSGRRYVRVELPFTLLQEWLTAGKVADVPVSPLHLPGSIKLTDPKTFCAEAQKTLSIFAQPRATIFFEQLGDRVRFRFEASGGPATMNAAYNAAGRS

SEQ ID NO: 1323 - protein, 389 aa, Sutterella wadsworthensis
MKACDLEEKTNHLQACVAIDLGARYTGTFSILHKSSHLPSKDDCRAATYVLPEDGGKMTYSQRNRTAVRHRIRGKKRFALARRMAMLIIREKLAAKSVTLTSSETRRLAEAVGSLLRRRGYNRLETETDNDLTVLENIEPEVFSEHEILGKYFYAGTDLAIQWETLSQDLSKISSLLAERLSEKDFKKYLTGLIPDDKNKIKHIISVFKMLIDEAESINMQCVLGHKHRTQYLSDIHADMHRDTRLSKAAEAFGGVDRLWRLLGNLSNLQLRAHRWYFNAPHLFDDQALEPARLQKTLVRAFKYLHCPQGVESRAQAELVKELEEADDIIDALCTIDPVRTIPPYENQQNRRPPFDQTLYLSPDLGVSGFLCLGRLFQGQPNEAALCFL

SEQ ID NO: 1324 - protein, 976 aa, Tannerella sp.
MKKILGLDLGSNSIGWALVNEAENRDEASSIIKLGVRVNPLTVDEMQNFEKGKSITTNADRTLKRSMRRNLQRYKLRRDALIKLLKKVGFITDGTILSEQGNRTTFETYRLRAKAPDEEISLQELARVLLMINKKRGYKSSRKIKEKEAGTLIDGMEVAKKLYDEDLTPGQLCLQLLESGKKSLPDFYSSDLQEEFDRIWNFQKQFNPKAFCDTAKEEIKGKNKSQTWAILAKYFIWMEEMDVWNEKESKTERVEKECKLVGLKRTVKKEEQRKENYCWRVQALTEQLDLEKVAVVLQEINGQISTSSGYLGAISDRSKVLYFNRQTVGQYQMAELEKNPNTSLRNMVFYRQDYLDEFDKIWEKQAEFHKELTVELKKEIRDIIIFYQRRLKSQKGLIGFCEFENREIMVEKNGKMQAKVVGCKVIPRSHPLFQEFKIWQTLNNVEVFAGEKKCKRKRTDAFPGLFDGTEDTLMVEGWRYLYQEEKEILAKELSVKKSLKKEYILKLLFDNPQDLDMNFEQIEGNDTGNVLFSAYSKMIEKYGYEPLDFGKPTDKIIEQLQVIFADLGWNTDLLFVDLNKEGKDLEKQPYFKLWHLLYSFEGDNTPTGNGKLVEKLMELCHVGKECALELVNISFQNDYGSLSAKAIKKILPYLKEGNRYDVACGYAGYRHSKSSLTKEEIENKVLKDKLDILPKNSLRNPVVEKILNQMVNVINAIIDTYGKPDEIRVELARELKKSAKEREELTKAIAKSTREHEEIRKVLQEEFGMINVSRNDIIRYKLYKELKDNGYKTLYSNQDIPKEKVFSKEIDIEHIIPQARLFDDSLSNKTLEYKAINIEKGNKTAYDFVKEKYGEKGLQQYLNRCESLFKGHRTKLRKLKMGQENIPEGFIDRDLRNTQYIAKKALAMLNEICRRVVATTGSITDRLREDWQLVDVLKELRCFRYFKDTKMKANHNKNIFYTSIKVDVSDTSKILK

SEQ ID NO: 1325 - protein, 1049 aa, Tistrella mobilis
MINERLTFGIDLGIGSCGWAVLRHADAAGEPGVIEGLGSWCFDVPETSKERIPTNQVRRSNRLLRRVIRRRRNRMAEIRRLFHAQGLLPSADEDALKRPRLDPWELRARGLDQCLSAEEFAVALGHIARHRGFRSSAKRKAANTSGEDSKMLSALLVTRERTARYRTVGEMFARDPEYSARRRNRDGIFDRTVARDDLIHEVGKLFEAQRARGSAFASPDLEADFNAIAFRQAEMQDSERLVGNCPFERDEKRAARWAPSFERFRLLTRLINLRIATAEGERRFTPEDLARVSAELGATAKLPVSRVRALIGLLPDERFTTIRVEDEDRDIVARTGEAAPGTWRLRKTLGEALWAEMQARPDQLDAIAHVLSFFEATAKIRSELDRLGLPAAVIEALDRGLEDGAFAKFKGAGHISAKACRNLLPHLQQGHRYDQACRLAGYDHAASTLSHTAQVVSKAGFNALVTELGESIANPIARKALTEGLKQIRAMCARWGLPGAIHIELAREVGNSIEKRRELESQRETTTKRRQTERDEIRGLLALEDVDDDTLLRYRLWKEQGGKCLYTGKDIHVRQLIATDNSVQVDHILPWSRFGDDSFNNKTLCLASANQRKRGQTPWEWFSLTGTPEAWEVFASRVETSKDLRGFKKRNLLLKNADEVAQRFRSRNLNDTRYAARLLAEAAKLFYPAGDRQEKDGRRRVLTRPGPLTAALRHAWGLESLKKADGKRVSDDRHHALDALAVAAISEREVQRLTRSFQEWEQQGLARPLRHVAPPWPGFRGDVLAAYAQAFVARPERRRARGKGHDASIRQVVGEGPEAQVFERRGLADLKEADLDRVKDPERNQAIIEAVRAWILAGRPADAPPRSPRGDVIVKLRTAPAKKIKPAVPVRGGTADRGDMVRIDVFTRPNRKGRDEWYLVPIYPHQVMNRKAWPHPPMRSVVAYKDEAGWTEIGAEHSFRFSLYPRSYVQLVKSNGDVIEGYLVSMDRSTGAFRVFVHNNPAEMAKGIGAKTLLNLRKFNVDRFGVRTEVKSEVRTWHGEVCTSPVPPD

SEQ ID NO: 1326 - protein, 1395 aa, Treponema denticola
MKKEIKDYFLGLDVGTGSVGWAVTDTDYKLLKANRKDLWGMRCFETAETAEVRRLHRGARRRIERRKKRIKLLQELFSQEIAKIDEGFFQRMKESPFYAEDKTILQENALFNDKDFTDKTYHKAYPTINHLIKAWIENKVKPDPRLLYLACHNIIKKRGHFLFEGDFDSENQFDTSIQALFEYLREDMEVDIDADSQKVKEILKDSSLKNSEKQSRLNKILGLKPSDKQKKAITNLISGNKINFADLYDNPDLKDAEKNSISFSKDDFDALSDDLASILGDSFELLLKAKAVYNCSVLSKVIGDEQYLSFAKVKIYEKHKTDLTKLKAVIKKHFPNNYKKVFGYNQDNESKNNYSGYVGVCKTKNKKLVINNSVNQEDFYKFLKPILSAKSEIKEVNDILAEIETGNFLPKQISKSNAEIPYQLRKMELEKILSNAEKHFSFLKQKDEKGLSHSEKIIMLLTFKIPYYIGPINDNHKKSFPDRCWVVKKEKSPSGKTTPWNFFDHIDKEKTAEEFITSRTNFCTYLIGESVLPKNSLLYSEYTVLNEINNLQIIIDGKNICDTKLKQKIYEDLFKKYKKITQKQISTFIKHEGICNKTDEVIILGIDKECTSSLKSYIELKNIFGKQVDEISTKNMLEEIIRWATIYDEGEGKTILKTKIKAEYGKYCSDEQIKKILNLKFSGWGRLSRKFLETVTSEMPGFSEPVNIITAMRETQNNLMELLSSEFKFTENIKKINSGFEDAEKQFSYDGLVKPLFLSPSVKKMLWQTLKLVKEISHITQAPPKKIFIEMAKGAELEPARTKTRLKILQDLYSSCKNDADAFSSEIQYLSGKIENEDNLRLRSDKLYLYYTQLGKCMYCGKPIEIGHVFDTSNYDIDHIYPQSKIKDDSISNRVLVCSSCNKNKEDKYPLKSEIQSKQRGFWNFLQRNNFISLEKLNRLTRTTPISDDETAKFIARQLVETRQATKVAAKVLEKMFPETKIVYSKAETVSMFRNKFDIIKCREINDFHHAHDAYLNIVVGNVYNTKFTNNPWNFIKEKRDNPKIADTYNYYKVFDYDVKRNNITAWEKGKTIITVKDMLKRNTPIYTRQAACKKGGLFDQTIMKKGLGQHPLKKEGPFSNISKYGGYNKVSAAYYTLIEYEEKGNKIRSLETIPLYLVKDIQKDQDVLKSYLTDLLGKKEFKILVPKIKINSLLKINGFPCHITGKTNDSFLLRPAVQFCCSNDEVLYFKKIIRFSEIRSQREKIGKTISPYEDLSFRSYIKENLCKKTKNDEIGEKEFYDLLQKKNLEIYDMLLTKHKDTIYKKRPNSATIDILVKGKEKFKSLIIENQFEVILEILKLFSATRNVSELQHIGGSKYSGVAKIGNKISSLDNCILIYQSITGIFEKRIDLLKV

SEQ ID NO: 1327 - protein, 769 aa, Treponema denticola
MKKEIKDYFLGLDVGTGSVGWAVTDTDYKLLKANRKDLWGMRCFETAETAEVRRLHRGARRRIERRKKRIKLLQELFSQEIAKIDEGFFQRMKESPFYAEDKTILQENALFNDKDFTDKTYHKAYPTINHLIKAWIENKVKPDPRLLYLACHNIIKKRGHFLFEGDFDSENQFDTSIQALFEYLREDMEVDIDADSQKVKEILKDSSLKNSEKQSRLNKILGLKPSDKQKKAITNLISGNKINFADLYDNPDLKDAEKNSISFSKDDFDALSDDLASILGDSFELLLKAKAVYNCSVLSKVIGDEQYLSFAKVKIYEKHKTDLTKLKAVIKKHFPNNYKKVFGYNQDNESKNNYSGYVGVCKTKNKKLVINNSVNQEDFYKFLKPILSAKSEIKEVNDILAEIETGNFLPKQISKSNAEIPYQLRKMELEKILSNAEKHFSFLKQKDEKGLSHSEKIIMLLTFKIPYYIGPINDNHKKSFPDRCWVVKKEKSPSGKTTPWNFFDHIDKEKTAEEFITSRTNFCTYLIGESVLPKNSLLYSEYTVLNEINNLQIIIDGKNICDTKLKQKIYEDLFKKYKKITQKQISTFIKHEGICNKTDEVIILGIDKECTSSLKSYIELKNIFGKQVDEISTKNMLEEIIRWATIYDEGEGKTILKTKIKAEYGKYCSDEQIKKILNLKFSGWGRLSRKFLETVTSEMPGFSEPVNIITAMRETQNNLMELLSSEFKFTENIKKINSGFEDAEKQFSYDGLVKPLFLSPSVKKCCGRL

SEQ ID NO: 1328 - protein, 1395 aa, Treponema denticola
MKKEIKDYFLGLDVGTGSVGWAVTDTDYKLLKANRKDLWGMRCFETAETAEVRRLHRGARRRIERRKKRIKLLQELFSQEIAKIDEGFFQRMKESPFYAEDKTILQENALFNDKDFTDKTYHKAYPTINHLIKAWIENKVKPDPRLLYLACHNIIKKRGHFLFEGDFDSENQFDTSIQALFEYLREDMEVDIDADSQKVKEILKDSSLKNSEKQSRLNKILGLKPSDKQKKAITNLISGNKINFADLYDNPDLKDAEKNSISFSKDDFDALSDDLASILGDSFELLLKAKAVYNCSVLSKVIGDEQYLSFAKVKIYEKHKTDLTKLKAVIKKHFPNNYKKVFGYNQDNESKNNYSGYVGVCKTKNKKLVINNSVNQEDFYKFLKPILSAKSEIKEVNDILAEIETGNFLPKQISKSNAEIPYQLRKMELEKILSNAEKHFSFLKQKDEKGLSHSEKIIMLLTFKIPYYIGPINDNHKKSFPDRCWVVKKEKSPSGKTTPWNFFDHIDKEKTAEEFITSRTNFCTYLIGESVLPKNSLLYSEYTVLNEINNLQIIIDGKNICDTKLKQKIYEDLFKKYKKITQKQISTFIKHEGICNKTDEVIILGIDKECTSSLKSYIELKNIFGKQVDEISTKNMLEEIIRWATIYDEGEGKTILKTKIKAEYGKYCSDEQIKKILNLKFSGWGRLSRKFLETVTSEMPGFSEPVNIITAMRETQNNLMELLSSEFKFTENIKKINSGFEDAEKQFSYDGLVKPLFLSPSVKKMLWQTLKLVKEISHITQAPPKKIFIEMAKGAELEPARTKTRLKILQDLYSSCKNDADAFSSEIQYLSGKIENEDNLRLRSDKLYLYYTQLGKCMYCGKPIEIGHVFDTSNYDIDHIYPQSKIKDDSISNRVLVCSSCNKNKEDKYPLKSEIQSKQRGFWNFLQRNNFISLEKLNRLTRTTPISDDETAKFIARQLVETRQATKVAAKVLEKMFPETKIVYSKAETVSMFRNKFDIIKCREINDFHHAHDAYLNIVVGNVYNTKFTNNPWNFIKEKRDNPKIADTYNYYKVFDYDVKRNNITAWEKGKTIITVKDMLKRNTPIYTRQAACKKGELFNQTIMKKGLGQHPLKKEGPFSNISKYGGYNKVSAAYYTLIEYEEKVNKIRSLETIPLYLVKDIQKDQDVLKSYLTDLLGKKEIKILVPKIKINSLLKINGFPCHITGKTGDSFVLRPAVQFCCSNDEVLYFKKIIRFNEIRSQREKMGKTISPYEDLSFRSYIKENLCKKTKADEIGEKEFYDLLQKKNLEIYDMLLTKHKDTIYNKRPNSTTLGMLTKGRYEFINLKPKDQIIVMLEILKLFCTTREAIDLGLIKGKPAAGVATLGKKISNLDNCILIYQSITGIFEKRIDLLKV

SEQ ID NO: 1329 - protein, 1395 aa, Treponema denticola
MKKEIKDYFLGLDVGTGSVGWAVTDTDYKLLKANRKDLWGMRCFETAETAEVRRLHRGARRRIERRKKRIKLLQELFSQEIAKIDEGFFQRMKESPFYAEDKTILQENTLFNDKDFTDKTYHKAYPTINHLIKAWIENKVKPDPRLLYLACHNIIKKRGHFLFEGDFDSENQFDTSIQALFEYLREDMEVDIDADSQKVKEILKDSSLKNSEKQSRLNKILGLKPSDKQKKAITNLISGNKINFADLYDNPDLKDAEKNSISFSKDDFDALSDDLASILGDSFELLLKAKAVYNCSVLSKVIGDEQYLSFAKVKIYEKHKTDLTKLKNVIKKHFPKDYKKVFGYNKNEKNNNNYSGYVGVCKTKSKKLIINNSVNQEDFYKFLKTILSAKSEIKEVNDILTEIETGTFLPKQISKSNAEIPYQLRKMELEKILSNAEKHFSFLKQKDEKGLSHSEKIIMLLTFKIPYYIGPINDNHKKSFPDRCWVIKKEKSPSGKTTPWNFFDHIDKDKTAEAFITSRTNFCTYLVGESVLPKSSLLYSEYTVLNEINNLQIIIDGKNICDIKLKQKIYEELFKKYKKITQKQISTFIKHEGICNKTDEVIILGIDKECTSSLKSYIELKNIFGKQVDEISTKNMLEEIIRWATIYDEGEGKTILKTKIKAEYGKYCSDEQIKKILNLKFSGWGRLSRKFLETVTSEMPGFSEPVNIITAMRETQNNLMELLSSEFKFTENIKKINSGFEDAEKQFSYNGLVKPLFLSPSVKKMLWQTLKLVKEISHITQAPPKKIFIEMAKGAELEPARTKTRLKILQDLYNNCKNDADAFSSEIKDLSGKIENEDNLRLRSDKLYLYYTQLGKCMYCGKPIEIGHVFDTSNYDIDHIYPQSKIKDDSISNRVLVCSSCNKNKEDKYPLKSEIQSKQRGFWNFLQRNNFISLEKLNRLTRTTPISDDETAKFIARQLVETRQATKVAAKVLEKMFPETKIVYSKAETVSMFRNKFDIIKCREINDFHHAHDAYLNIVVGNVYNTKFTNNPWNFIKEKRDNPKIADTYNYYKVFDYDVKRNNITAWEKGKTIITVKDMLKRNTPIYTRQAACKKGGLFDQTIMKKGLGQHPLKKEGAFSNISKYGGYNKVSAAYYTLIEYEEKGNKIRSLETIPLYLVKDIQKDQDVLKSYLTDLLGKKEIKILVPKIKINSLLKINGFPCHITGKTGDSFVLRPAVQFCCSNDEVLYFKKIIRFNEIRSQREKMGKTISPYEDLSFRSYIKENLCKKTKADEIGEKEFYDLLQKKNLEIYDMLLTKHKDTIYNKRPNSTTLGMLTKGRYEFINLKPKDQIIVMLEILKLFCTTREAIDLGLIKGKPAAGVATLGKKISNPDNCILIYQSITGIFEKRIDLLKV

SEQ ID NO: 1330 - protein, 1395 aa, Treponema denticola
MKKEIKDYFLGLDVGTGSVGWAVTDTDYKLLKANRKDLWGMRCFETAETAEVRRLHRGARRRIERRKKRIKLLQELFSQEIAKIDEGFFQRMKESPLYAEDKTILQENTLFNDKDFTDKTYHKAYPTINHLIKAWIENKVKPDPRLLYLACHNIIKKRGHFLFEGDFDSENQFDTSIQALFEYLREDMELDIDADSQKVKEILKDSSLKNSEKQSRLNKMLGLKPSDKQKKAITNLISGNKINFADLYDNPDLKDAEKNSISFSKDDFDALSDDLASILGDSFELLLKAKAVYNCSVLSKVIGDEQYLSFAKVKIYEKHKTDLTKLKNVIKKHFPKDYKKVFGYNKNEKNNNNYSAYVGVCKITHKKLVIKNSASQEDFYKFLKTILSAKSEIKEVNDILTEIETGTFLPKQISKSNAEIPYQLRKMELEKILSNAEKHFSFLKQKDEKGLSHSEKIIMLLTFKIPYYIGPINDNHKKSFPDRCWVVKKEKSPSGKTTPWNFFDHIDKEKTAEEFITSRTNFCTYLIGESVLPKSSLLYSEYTVLNEINNLQIIIDGKNICDIKLKQKIYEELFKKYKKITQKQISTFIKHEGICNKTDEVIILGIDKECTSSLKSYIELKNIFGKQVDEISTKNMLEEIIRWATIYDEGEGKTILKTKIKAEYGKYCSDEQIKKILNLKFSGWGRLSRKFLETVTSEMPGFSEPVNIITAMRETQNNLMELLSSEFKFTENIKKINSGFEDAEKQFSYNGLVKPLFLSPSVKKMLWQTLKLVKEISHITQAPPKKIFIEMAKGAELEPARTKTRLKILQDLYSSCKNDADAFSSEIQYLSGKIENEDNLRLRSDKLYLYYTQLGKCMYCGKPIEIGHVFDTSNYDIDHIYPQSKIKDDSISNRVLVCSSCNKNKEDKYPLKAEIQSKQRGFWNFLQRNNFISLEKLNRLTRTSPISDDETAKFIARQLVETRQATKVAAKVLEKMFPETKIVYSKAETVSMFRNKFDIIKCREINDFHHAHDAYLNIVVGNVYNTKFTNNPWNFIKEKRDNPKIADTYNYYKVFDYDVKRNNITAWEKGKTIITVKDMLKRNTPIYTRQAACKKGELFNQTIMKKGLGQHPLKKEGPLSNISKYGGYNKVSAAYYTLIEYEEKGSKIRSLETIPLYLVKDIQKNKDGLKSYLTDQIGKKEIKILIPKIKINSLLKINGFPCHITGKMGEAFVLRPAVQFCCSNDEALYFKKIIRFNEIRKQREKMGKTISPYEDLSFRSYIKDNLCKKTKADEIEEKEFYDLLQKKNLEIYDMLLTKHKDTIYKKRPNSATIDILVKGKEKFKSLIIENQFEVILEILKLFSATRNVSDLQHIGGSKNAGNARVGNKISSLDNCILIYQSITGIFEKRIDLLKI

SEQ ID NO: 1331 - protein, 1395 aa, Treponema denticola
MKKEIKDYFLGLDVGTGSVGWAVTDTDYKLLKANRKDLWGMRCFETAETAEVRRLHRGARRRIERRKKRIKLLQELFSQEIAKIDEGFFQRMKESPLYAEDKTILQENTLFNDKDFTDKTYHKAYPTINHLIKAWIENKVKPDPRLLYLACHNIIKKRGHFLFEGDFDSENQFDTSIQALFEYLREDMEVDIDADSQKVKEILKDSSLKNSEKQSRLNKMLGLKPSDKQKKAITNLISGNKINFADLYDNPDLKDAEKNSISFSKDDFDALSDDLASILGDSFELLLKAKAVYNCSVLSKVIGDEQYLSFAKVKIYEKHKTDLTKLKNVIKKHFPKDYKKVFGYNKNEKNNNNYSGYVGVCKTKSKKLIINNSVNQEDFYKFLKTILSAKSEIKEVNDILTEIETGTFLPKQISKSNAEIPYQLRKMELEKILSNAEKHFSFLKQKDEKGLSHSEKIIMLLTFKIPYYIGPINDNHKKSFPDRCWVVKKEKSPSGKTTPWNFFDHIDKEKTAEEFITSRTNFCTYLIGESVLPKNSLLYSEYTVLNEINNLQIIIDGKNICDTKLKQKIYEELFKKYKKITQKQISTFIKHEGICNKTDEVIILGIDKECTSSLKSYIELKNIFGKQVDEISTKNMLEEIIRWATIYDEGEGKTILKTKIKAEYGKYCSDEQIKKILNLKFSGWGRLSRKFLETVTSEMPGFSEPVNIITAMRETQNNLMELLSSEFKFTENIKKINSGFEDVEKQFSYDGLVKPLFLSPSVKKMLWQTLKLVKEISHITQAPPKKIFIEMAKGAELDPVRTKTRLKILQDLYNNCKNDADAFSSEIKDLSGKIENEDNLRLRSDKLYLYYTQLGKCMYCGKPIEIGHVFDTSNYDIDHIYPQSKIKDDSISNRVLVCSSCNKNKEDKYPLKAEIQSKQRGFWNFLQRNNFISLEKFNRLTRATPISDDETAKFIARQLVETRQATKVAARVLEKMFPETKIVYSKAETVSMFRNKFDIVKCREINDFHHAHDAYLNIVVGNVYNTKFTNNLWNFIKEKRDNPKIADTYNYYKVFDYDVKRNNITAWEKGKTIITVKDMLKRNTPIYTRQAACKKGGLFDQTIMKKGLGQHPLKKEGPFSNISKYGGYNKVSAAYYTLIEYEEKGNKIRSLETIPLYLVKDIQKDQDVLKSYLTDLLGKKEFKILVPKIKINSLLKINGFPCHITGKTNDSFLLRPAVQFCCSNDEVLYFKKIIRFSEIRSQREKIGKTISPYEDLSFRSYIKENLCKKTKNDEIGEKEFYDLLQKKNLEIYDMLLTKHKDTIYKKRPNSATIDILVKGKEKFKSLIIENQFEVILEILKLFSATRNVSDLQHIGGSKYSGVAKIGNKISSLDNCILIYQSITGIFEKRIDLLKV

SEQ ID NO: 1332 - protein, 357 aa, Treponema denticola
MKKEIKDYFLGLDVGTGSVGWAVTDTDYKLLKANRKDLWGMRCFETAETAEVRRLHRGARRRIERRKKRIKLLQELFSQEIAKTDEGFFQRMKESPFYAEDKTILQENALFNDRDFTDKTYHKAYPTINHLIKAWIENKVKPDPRLLYLACHNIIKKRGHFLFEGDFDSENQFDTSIQAFFEYLREDMEVDIDADSQKIKEILKDSSLKNSEKQSRLNKILGLKSSDKQKKAITNLISGNKINFADLYDNPDLKDAEKNSISFSKDDFDALSDDLASILGDSFELLLKAKAVYNCSVLSKVIGDEQYLSFAKVKIYEKHKTDLTKLKNVIKKHFPKDYKKVFGYNKNEKITTITPDM

SEQ ID NO: 1333 - protein, 1395 aa, Treponema denticola
MKKEIKDYFLGLDVGTGSVGWAVTDTDYKLLKANRKDLWGMRCFETAETAEVRRLHRGARRRIERRKKRIKLLQELFSQEIAKTDEGFFQRMKESPFYAEDKTILQENALFNDRDFTDKTYHKAYPTINHLIKAWIENKVKPDPRLLYLACHNIIKKRGHFLFEGDFDSENQFDTSIQALFEYLREDMEVDIDADSQKVKEILKDSSLKNSEKQSRLNKMLGLKPSDKQKKAITNLISGNKINFADLYDNPDLKDAEKNSISFSKDDFDALSDDLASILGDSFELLLKAKAVYNCSVLSKVIGDEQYLSFAKVKIYEKHKTDLTKLKNVIKKHFPNDYKKVFGYNKNEKNNNNYSAYVGVCKTKSKKLVINNTVNQEDFYKFLKPILLAKSEIKEVNDILTEIETGTFLPKQISKSNAEIPYQLRKMELEKILSNAEKHFSFLKQKDEKGLSHSEKIIMLLTFKIPYYIGPINDNHKKSFPDRCWVIKKEKSPSGKTTPWNFFDHIDKDKTAEAFITSRTNFCTYLVGESVLPKNSLLYSEYTVLNEINNLQIIIDGKNICDIKLKQKIYEELFKKYKKITQKQISTFIKHEGICNKTDEVIILGIDKECTSSLKSYIELKNIFGKQVDEISTKNMLEEIIRWATIYDEGEGKTILKTKIKAEYGKYCSDEQIKKILNLKFSGWGRLSRKFLETVTSEMPGFSEPVNIITAMRETQNNLMELLSSEFKFTENIKKINSGFEDVEKQFSYDSLVKPLFLSPSVKKMLWQTLKLVKEISHITQAPPKKIFIEMAKGAELDPVRTKTRLKILQDLYNNCKNDADAFSSEIKDLSGKIENEDNLRLRSDKLYLYYTQLGKCMYCGKPIEIGHVFDTSNYDIDHIYPQSKIKDDSISNRVLVCSSCNKNKEDKYPLKAEIQSKQRGFWNFLQRNNFISLEKLNRLTRTSPISDDETAKFIARQLVETRQATKVAAKVLEKMFPETKIVYSKAETVSMFRNKFDIIKCREINDFHHAHDAYLNIVVGNVYNTKFTNNPWNFIKEKRDNPKIADTYNYYKVFDYDVKRNNITAWEKGKTIITVKDMLKRNTPIYTRQAACKKGELFNQTIMKKGLGQHPLKKEGPLSNISKYGGYNKVSAAYYTLIEYEEKGSKIRSLETIPLYLVKDIQKNKDGLKSYLTDQIGKKEIKILIPKIKINSLLKINGFPCHITGKMGEAFVLRPAVQFCCSNDEALYFKKIIRFNEIRKQREKMGKTISPYEDLSFRSYIKDNLCKKTKADEIEEKEFYDLLQKKNLEIYDMLLTKHKDTIYKKRPNSATIDILVKGKEKFKSLIIENQFEVILEILKLFSATRNVSDLQHIGGSKNAGNARVGNKISSLDNCILIYQSITGIFEKRIDLLKI

SEQ ID NO: 1334 - protein, 631 aa, Treponema denticola
MLWQTLKLVKEISHITQAPPKKIFIEMAKGAELEPARTKTRLKILQDLYNNCKNDADAFSSEIKDLSGKIENEDNLRLRSDKLYLYYTQLGKCMYCGKPIEIGHVFDTSNYDIDHIYPQSKIKDDSISNRVLVCSSCNKNKEDKYPLRSEIQSKQRGFWNFLQRNNFISLEKLNRLTRTTPISDDETAKFIARQLVETRQATKVAAKVLEKMFPETKIVYSKAETVSMFRNKFDIVKCREINDFHHAHDAYLNIVVGNIYNTKFTNNPWNFIKEKRDNPKIADTYNYYKVFDYDVKRNNITAWEKGKTIITVKDMLKRNTPIYTRQAACKKGGLFDQTIMKKGLGQHPLKKEGPFSNISKYGGYNKVSAAYYTLIEYEEKENKIRSLETIPLYLVKDIQKSQEKLKSYLTDLLGKKEIKILVPKIKINSLLKINGFPCHITGKTNDSFLLRPAVQFCCSNDEVLYFKKIIRFNEIRSQREKMGKTISPYEDLSFRSYIKENLCKKTKNDEIGEKEFYDLLQKKNLEIYDMLLTKHKDTIYNKRPNSTTLGMLTKGRYEFINLKPKDQIIVMLEILKLFCTTREAIDLGLIKGKPAAGVATLGKKISNLDNCILIYQSITGIFEKRIDLLKV

SEQ ID NO: 1335 - protein, 631 aa, Treponema denticola
MLWQTLKLVKEISHITQAPPKKIFIEMAKGAELEPARTKTRLKILQDLYSSCKNDADAFSSEIQYLSGKIENEDNLRLRSDKLYLYYTQLGKCMYCGKPIEIGHVFDTSNYDIDHIYPQSKIKDDSISNRVLVCSSCNKNKEDKYPLKSEIQSKQRGFWNFLQRNNFISLEKLNRLTRTTPISDDETAKFIARQLVETRQATKVAAKVLEKMFPETKIVYSKAETVSMFRNKFDIIKCREINDFHHAHDAYLNIVVGNVYNTKFTNNPWNFIKEKRDNPKIADTYNYYKVFDYDVKRNNITAWEKGKTIITVKDMLKRNTPIYTRQAACKKGELFNQTIMKKGLGQHPLKKEGPFSNISKYGGYNKVSAAYYTLIEYEEKVNKIRSLETIPLYLVKDIQKDQDVLKSYLTDLLGKKEIKILVPKIKINSLLKINGFPCHITGKTGDSFVLRPAVQFCCSNDEVLYFKKIIRFNEIRSQREKMGKTISPYEDLSFRSYIKENLCKKTKADEIGEKEFYDLLQKKNLEIYDMLLTKHKDTIYNKRPNSTTLGMLTKGRYEFINLKPKDQIIVMLEILKLFCTTREAIDLGLIKGKPAAGVATLGKKISNLDNCILIYQSITGIFEKRIDLLKV

SEQ ID NO: 1336 - protein, 370 aa, Treponema denticola
MTEIETGTFLPKQISKSNAEIPYQLRKMELEKILSNAEKHFSFLKQKDEKGLSHSEKIIMLLTFKIPYYIGPINDNHKKSFPDRCWVVKKEKSPSGKTTPWNFFDHIDKEKTAEEFITSRTNFCTYLVGESVLPKSSLLYSEYTVLNEINNLQIIIDGKNICDIKLKQKIYEELFKKYKKITQKQISTFIKHEGICNKTDEVIILGIDKECTSSLKSYIELKNIFGKQVDEISTKNMLEDIIRWAAIYDEGEGKTILKTKIKAEYGKYCSDEQIKKILNLKFSGWGRLSRKFLETVTSEMPGFSEPVNIITAMRETQNNLMELLSSEFKFTENIKKINSGFEDVEKQFSYDGLVKPLFLSPSVKKCCGRL

SEQ ID NO: 1337 - protein, 591 aa, Treponema phagedenis
MARGKEAEKGRTSSRYASIKALYENCKQDLADYDAVLEQFKSEEPLRLRSDKLYLYYTQLGRCMYTGRVIDIDRLMSDNSAYDIDHIYPRSKIKDDSLTNRVLVVKDANQDKRDEPLSPQIQDKQKGFWDFLKHNNFISIEKYERLTYRGYFTEEMLSGFIARQLVETRQGTKTAGQILEQLYPDSTVVYCKAANTSEFRQKFNLIKCREINDLHHAHDAYLNIAVGNVYYTKFTSNPRNFMKLKEPYNLRELFDRDVERNNTIAWVKNKTITTIKDMLKRNTPLYTRYAYCKTGGFFDQNIMKKGKGQFPLKENSPLSDISKYGGYNKVSGAYFILVQKKEKDAVVRILETVPLYLLNKPGKESENVREYLSTALGTKDFKILIPKIKINSLFKINGFLVHITGKTNDRFLVRSAVQFFCDDNLTLFFKRIIAFNGLRNLNKDKSMTAYDDNTMRVYVRGNLFKDKNQLFDKNKFNEIVKGKNISVYKDMVKRYETSIYKFRPNTAVIPILKSGEDKFINLPIEEQFKILQEILKLFGAINGTANLTLIGGRPSTGEMKISNNISNLKQCILIHQSPTGVFEQQIDLLKI

SEQ ID NO: 1338 - protein, 1062 aa, Treponema sp.
MIMKLEKWRLGLDLGTNSIGWSVFSLDKDNSVQDLIDMGVRIFSDGRDPKTKEPLAVARRTARSQRKLIYRRKLRRKQVFKFLQEQGLFPKTKEECMTLKSLNPYELRIKALDEKLEPYELGRALFNLAVRRGFKSNRKDGSREEVSEKKSPDEIKTQADMQTHLEKAIKENGCRTITEFLYKNQGENGGIRFAPGRMTYYPTRKMYEEEFNLIRSKQEKYYPQVDWDDIYKAIFYQRPLKPQQRGYCIYENDKERTFKAMPCSQKLRILQDIGNLAYYEGGSKKRVELNDNQDKVLYELLNSKDKVTFDQMRKALCLADSNSFNLEENRDFLIGNPTAVKMRSKNRFGKLWDEIPLEEQDLIIETIITADEDDAVYEVIKKYDLTQEQRDFIVKNTILQSGTSMLCKEVSEKLVKRLEEIADLKYHEAVESLGYKFADQTVEKYDLLPYYGKVLPGSTMEIDLSAPETNPEKHYGKISNPTVHVALNQTRVVVNALIKEYGKPSQIAIELSRDLKNNVEKKAEIARKQNQRAKENIAINDTISALYHTAFPGKSFYPNRNDRMKYRLWSELGLGNKCIYCGKGISGAELFTKEIEIEHILPFSRTLLDAESNLTVAHSSCNAFKAERSPFEAFGTNPSGYSWQEIIQRANQLKNTSKKNKFSPNAMDSFEKDSSFIARQLSDNQYIAKAALRYLKCLVENPSDVWTTNGSMTKLLRDKWEMDSILCRKFTEKEVALLGLKPEQIGNYKKNRFDHRHHAIDAVVIGLTDRSMVQKLATKNSHKGNRIEIPEFPILRSDLIEKVKNIVVSFKPDHGAEGKLSKETLLGKIKLHGKETFVCRENIVSLSEKNLDDIVDEKIKSKVKDYVAKHKGQKIEAVLSDFSKENGIKKVRCVNRVQTPIEITSGKISRYLSPEDYFAAVIWEIPGEKKTFKAQYIRRNEVEKNSKGLNVVKPAVLENGKPHPAAKQVCLLHKDDYLEFSDKGKMYFCRIAGYAATNNKLDIRPVYAVSYCADWINSTNETMLTGYWKPTPTQNWVSVNVLFDKQKARLVTVSPIGRVFRK

SEQ ID NO: 1339 - protein, 281 aa, Treponema vincentii
MKTLGLDIGTNSIGWGIVDETANKIEDCGVYIFPEGVKKEKGNESSKAAERTSFRLARRLKFRRKLRKCETLKVLIKNKMCPLTMEELEKWRKQKIYPVSQDFLNWYRTDELKNWEPYFLRKKCAEQKAGPYEIGRALYHLAQRRGFLSNRKESTKASDGKVSKSIDELSSLMDGRTLGQYFYELKQSGEKVRGKYTSRKEHYEKEFNKICEVQEISPELKDDLYRAIFFQRKLKSQKFLVGKCTFERNKPRAPISHFEFEEFRMLSFINSIKIAKKLRRR

SEQ ID NO: 1340 - protein, 675 aa, uncultured bacterium
MTAENYSNVRFAFDIGTNSIGWAVFQLNDKQEATSILNAGARIFSDGRDPKTFEPLAVRRRNVRSASRMRDRYLRRRKRTLDKLIGYGLLPEDKAERDKILLETNDKPSGSTDKKTDPYSLRARALEEKLPLAYVARALFHIGQRRGFKSNRKADRKSNEKGKIAAGIEELSGLMHQSHAPTLGAYLAKRREEGHVVRLRASSEALTNKAYAFYPERAMLEDEFHKIWQAQAEYYPDVLTKEREEELFHVMFFQRPLKEQKVGLCTLVEGELRLPKSDPLFQQFRLYKEINELAIILPDLSQRKLTMEERDTLITLMRPAKTKTFAALRKALKIPAGGRFNKETENRKQLTGDEVYSVFSKPELFGGDWAKFSIEQQREIIDQLNNEENPDKLEEWLKNKFPKLSDEQRSEIINANLPDGYGRFGITATSKILEQLKKDVISEAEAAHRCGFDHSLANRNWKGLDELPRYQEVLERHIVPGTGDKNDIYDIYKGRLTNPTVHIGLNQVRRLTNRLIKAYGKPWQIVVELARDLPMSSEERKEHNKTLNDNIKAGFERTQKLERLGQKDNANNRLLLKLWEELGKDPDDRKSIYSGTRITEPMLFSGEVEIDHILPFSLTYDDSYANKILCLREENRIKRNRAPADVTEWKDRYDEIIGRSKNCQRTNKNVLGPMQ

SEQ ID NO: 1341 - protein, 1017 aa, uncultured bacterium]
MRVDSLGRCLSDEEWARVIYHLCKHRGFHWISRAEAKQTEGDSKSEGGKVKQGLAGTAKLMDEKGYRSAAEMVLAEFPEAQRNKQGEYRKALSRELLAKELALLFARQRVFGNRHATDTLETAILGNSDKKSGLFWQQKPALAGADLLKMLGTCTFEKNEYRAPKASFTAERHVWLTRLNNLRIVTDGITRQLTEQERQLVLPLPYRQAGDLTYKQLGMALTKAGLLEAGCFKFIGLAYPTEAQKAEGKTKDPESATLVKIPAWQELRQTLNKASLNDEWEKLSGDALCGQPEIFDKIAWILSVYKDDDEVRTELAKLVLPNPEGLTEALLNIRFDKFHALSLKALRAIVPHMEKGLRYDEACVQAGYHHSQLHKIGEGEHKYLPPLYDGRDGDGRMIFAEDADIPRNPVVLRSLNQARKVVNAIIRRYGSPSAVHIEMARDLSRPFDERNKIKKDQDEYQARNQRDREQFIELFGHPPKGLEFEKWRLYREQNGQCAYSQKPLASSGDVAEIFLDGSTEIDHALPYSRSFDDSKNNKVLVLTRENRDKGNRTPYEYLGGAENSERWQRFFSFVESNKAYRLAKRTRLLRKDFGAKESEEFRERNLNDTRYVCRFFKNYVEQHLKLAEGSEAKRCVVVSGQLTNFLRTRWGLLKIRSDSDRHHALDAAVVAACSHSMVQRLSNYSRTRELEQVRDGFVNIETGEIVNPAMHQQLREHFPDPWPYFRHELEARLKIDSPALLREEMARLSSYTEEELAALKPLFVSRAPQRRNGGAAHKDTIYGQPEKLKKNGSVSQKVALASLALKDIDLLADPHRNAKLYGAIRERLEAHGGKGDKAFPATNPLRKPDKEGNPTGPIVRTVTKVIDKLSGIPVRGGIAKNDTMLRVDVFTKAGRFHLVPVYVHHRVTGLPNQAITRGKDENQWAIIDDTFEWRFSLYPNDLVQIRLKDETHLGYYASTDRSTSSISIWAHDRNQSVGKDGLIRSIGVTTAKDIEKFHVDTLGNVYPAPPEKRRGLA

SEQ ID NO: 1342 - protein, 600 aa, uncultured bacterium]
VNAIIKKHGSLSAVHIEMARDLSRPLDERREVKKLQEEFKDRNDKARESFEADHGYRPKGIVFEKWMLYREQHGKCAYSMEGLDIDRVLNDANYAQIDHALPYSRSYDDSKNNKVLVLTRENQNKGNRTAYEYLTSFAGGEDGDRWRNYAAWVNSNKSYRMAKRNRLLRKNYGPDEASGFKDRNLNDTRYICKFFKNYVEEHLQLAPRADGNANKRCVVVNGQLTAFLRARWGLSKVRSESDRHHALDAAVVAACSHGMVKALADYARNKEVAYLREGFPDPETGEIINPEAHARGVHHFPEPWAHFRHELQVRLYSDDLQALREDLQRLGTYSEQDLLGVRTLFVSRAPQRRNDGAVHKETIYAQPEALRKQGGVVQKVPLTSLSLKDLDNLADPHRNAKLYTALRARLEAHGGKADKAFGPDQPFYKPDKNGNPTGPIVRTIKLVIDKLSGIPIRGGVAKNDTMLRVDVFTKAGKFHLVPVYVHHRVTGLPDRAIVAFKDEVEWTQVDDSFKFLFSIHPNDLIRIGLKAKEPMIGYFASCHRGTGAFNVWSHDRNTSVGKSGSVEGIGIKTALSLEKLNIDVLGNVYPARPEQRHGLA

SEQ ID NO: 1343 - protein, 1011 aa, uncultured delta
MSSKAIDSLEQLDLFKPQEYTLGLDLGIKSIGWAILSGERIANAGVYLFETAEELNSTGNKLISKAAERGRKRRIRRMLDRKARRGRHIRYLLEREGLPTDELEEVVVHQSNRTLWDVRAEAVERKLTKQELAAVLFHLVRHRGYFPNTKKLPPDDESDSADEEQGKINRATSRLREELKASDCKTIGQFLAQNRDRQRNREGDYSNLMARKLVFEEALQILAFQRKQGHELSKDFEKTYLDVLMGQRSGRSPKLGNCSLIPSELRAPSSAPSTEWFKFLQNLGNLQISNAYREEWSIDAPRRAQIIDACSQRSTSSYWQIRRDFQIPDEYRFNLVNYERRDPDVDLQEYLQQQERKTLANFRNWKQLEKIIGTGHPIQTLDEAARLITLIKDDEKLSDQLADLLPEASDKAITQLCELDFTTAAKISLEAMYRILPHMNQGMGFFDACQQESLPEIGVPPAGDRVPPFDEMYNPVVNRVLSQSRKLINAVIDEYGMPAKIRVELARDLGKGRELRERIKLDQLDKSKQNDQRAEDFRAEFQQAPRGDQSLRYRLWKEQNCTCPYSGRMIPVNSVLSEDTQIDHILPISQSFDNSLSNKVLCFTEENAQKSNRTPFEYLDAADFQRLEAISGNWPEAKRNKLLHKSFGKVAEEWKSRALNDTRYLTSALADHLRHHLPDSKIQTVNGRITGYLRKQWGLEKDRDKHTHHAVDAIVVACTTPAIVQQVTLYHQDIRRYKKLGEKRPTPWPETFRQDVLDVEEEIFITRQPKKVSGGIQTKDTLRKHRSKPDRQRVALTKVKLADLERLVEKDASNRNLYEHLKQCLEESGDQPTKAFKAPFYMPSGPEAKQRPILSKVTLLREKPEPPKQLTELSGGRRYDSMAQGRLDIYRYKPGGKRKDEYRVVLQRMIDLMRGEENVHVFQKGVPYDQGPEIEQNYTFLFSLYFDDLVEFQRSADSEVIRGYYRTFNIANGQLKISTYLEGRQDFDFFGANRLAHFAKVQVNLLGKVIK

SEQ ID NO: 1344 - protein, 1011 aa, uncultured delta proteobacterium HF0070_07E19; identical to SEQ ID NO: 1343

SEQ ID NO: 1345 - protein, 1120 aa, Veillonella sp.
MGFKANLVNLFTDEDIEVILPEEKEFKSINLHEGIYEDVRDAYEDAWGDRFAIVDQCKVLHDIIVISSIIKPGQSLSEAKIESYNQHKEDLVLLKSVLKEDRKLYDDMFVVDTDKGTNYVKYTKQGVNGNTSATQEEFYKYVRKVVSVLPETEHTRRIVQKLEEGTFLPLQRISKNGVVPYQLHKEELVRILDKATVNFPFLNKVENGLTVADKIISILEFKIPYYVGPLNPTHSIENGGFAWVVRKEAGQVLPWNFEQKVDVQASAVKFIENLTNKCTYLIDQDVLPKYSLLYAEFSLLNELNNIRVNDKPLPADVKQAFIRDHFISLQDSKTATKKVVAKYLVDNNYVSQPPIITGMDQQIATKLTSHRDMTRILGEHFDHAMAEDIIRYITIFGESKDMLRQVLKNYYGDRLTTEQIKKLGKLTYTGWGRLSKKFLSDIWGMKKNDDDAEAGTIIEHMREGQENLMQLLSSSYSFIDVVQEYVTNVLGEKEKTAFEMLEDLSLSPMVKRSVWQTLRILDEIVSIRKELPKKIFVEVARTNKADKKRTQSRKALLEELYKQIKDEDVHVLQQELESKEDSALNSKKLYLYFTQMGRCMYSGRRIDIHELFTDKYDIDHIYPRSLTKDDSWHNIVLVEKQLNAEKTDRFPILSAIQSKQKGFWKLLWDRGFISEKKYDRLVRTTDLTDEELNQFINRQMVSTNQSVKAVTTLLHQLYPETEVVFSKAENVSDFRHDYDFVKVRSINHHHHAKDAYLNIVVGNVYHEKFTKNFLSFAKQKGTRRTYNLTKIFEYEIKLTEESKKVIWDPNIHMDIVKKMMKSNDVRVTQRAVPQKGGLSDETIYKKGIAKRGVYLPLKSSDERVRDVEKYGGRTSITISEYIILNIRDTSDQDRIEIFSLPLYIAGKKDIHKAIEEAYLSTCKKPASVVDIQILYRGLYIGSKVNINGFTYYMGGKTGSNVSIDSAVDVVMDITSSVYIKLLEKVAIKKIENPKTFRIENIKTSYNHKEVTVSKEQNIALYQELLKKLDTPLFSKMKGNKLEEFRTVGFDTFIALSLEEQASVLLEVLNVLTNFKTKRDITKIGMTSSRSTLGINISNTEQFSVITTSITGLYEQEIKIK

SEQ ID NO: 1346 - protein, 983 aa, Verminephrobacter aporrectodeae
MRRRRDRLLKRKARMHDQLMRHGFFPADAAGRKVLERLNPYQLRAKGLHQALTPGEFARALFHINQRRGFQSNRKTDRKDNESGALKQAISELRAQIHDSGCATVGEWFWKERMQQKPEGVHRQGVRARYRETPYTTDEGRQRIDKRYDLYVDRAMIEQEFDALWAVQAALQPGLFTDAACKELRYTLLFQRKLRPVKPGRCTLLPEEERAPLALPSTQRFRILQEVNHLRLLDEALREVPLTLAQRDALVAALESQGKLGFAPMRKLLKLPGTVKFNLEDEKRTELKGNATSAILARKDLFGPAWAGFDAALQDEIVWQLVSEEGEGRLIAWLQQHTGVDEARAEAIADTSLPEGYGSLSRKALERIVPALQREVCSYDKAVQAAGFAHHSDLGFDFEHSGDEVQQVGERIIASTGEVRPLFAFKQLPYYGKALQRHVAFGSGKPEDPEEKRHGKIANPTVHIGLNQVRTVVNALIRRYGRPSEVVVELARDLKQSREQQQETQRKQAENQRRNTRIRERIAETLGISPERVRSSDIQKWILWEELSFDVVDRRCPYSGEQISTTMLLSPKVEIEHILPFSQTLDDSLNNRTVALREANRIKRNRTPWDARADFEARGWSYEGILHRAERMPLRKRYRFAPDGYQRWLGEDKDFLARALNDTRYLSRVAANYLRLVCPKPQGVRVIPGRMTAMLRAKFGLNDVLGLDGEKNRNDHRHHAVDACVIGVTDQGLMQRFARASAQAREDGLTRLVQDMPLPWPSYRDHVERAVRHIWVSHKPDHGFEGAMMEETAYGIRKDGSIKPRRKADGSAGREVVNLIRITESRQPVRHGVDSQGQPLPYKGYVGGSNYCIEITANDQGKWEGAVISTFEAYRIVRASGWGRLRHCSHGQNGRPLMMRLMIGDAVRLALDGSEKTMRVVKISANGQVFLVAPNEANVDARNRDKADPFAYVSKKAGSFQSAKARQVSISPIGELRDPGFKG

SEQ ID NO: 1347 - RNA, 94 nt, artificial  sequence
  Synthetic Sequence
guuuucccuuuucaaagaaaucuccugggcaccuaucuucuuaggugcccucccuuguuuaaaccugaccaguuaaccggcugguuagguuuuu

SEQ ID NO: 1348 - RNA, 22 nt, artificial  sequence
  Synthetic Sequence
gagauuuaugaaaagggaaaac

SEQ ID NO: 1349 - RNA, 36 nt, artificial  sequence
  Synthetic Sequence
uaaucccacagccgccaguuccgcuggcggcauuuu

SEQ ID NO: 1350 - DNA, 10 bp, artificial  sequence
  Synthetic Sequence
aagccaaaaa

SEQ ID NO: 1351 - DNA, 15 bp, artificial  sequence
  Synthetic Sequence
tcttcattgcgctta

SEQ ID NO: 1352 - RNA, 73 nt, artificial  sequence
  Synthetic Sequence
aacagcauagcaaguuaaaauaaggcuaguccguuaucaacuugaaaaguggcaccgagucggugcuuuuuuu

SEQ ID NO: 1353 - DNA, 20 bp, artificial  sequence
  Synthetic Sequence
gcagcagaagaagcctttgt

SEQ ID NO: 1354 - DNA, 20 bp, artificial  sequence
  Synthetic Sequence
ttcctcctctccctcctctc

SEQ ID NO: 1355 - RNA, 125 nt, artificial  sequence
  Synthetic Sequence
  misc_feature (13)..(112): n is a, c, g, or u
guuuuagagcuannnnnnnnnnnnnnnnnnnnnnnnnnnnnnnnnnnnnnnnnnnnnnnnnnnnnnnnnnnnnnnnnnnnnnnnnnnnnnnnnnnnnnnnnnnnnnnnnnnnuagcaaguuaaaa

SEQ ID NO: 1356 - RNA, 123 nt, artificial  sequence
  Synthetic Sequence
  misc_feature (12)..(111): n is a, c, g, or u
guuuagagcugnnnnnnnnnnnnnnnnnnnnnnnnnnnnnnnnnnnnnnnnnnnnnnnnnnnnnnnnnnnnnnnnnnnnnnnnnnnnnnnnnnnnnnnnnnnnnnnnnnnncagcaaguuaaa

SEQ ID NO: 1357 - RNA, 124 nt, artificial  sequence
  Synthetic Sequence
  misc_feature (13)..(112): n is a, c, g, or u
guuuuagagcugnnnnnnnnnnnnnnnnnnnnnnnnnnnnnnnnnnnnnnnnnnnnnnnnnnnnnnnnnnnnnnnnnnnnnnnnnnnnnnnnnnnnnnnnnnnnnnnnnnnncagcgaguuaaa

SEQ ID NO: 1358 - RNA, 128 nt, artificial  sequence
  Synthetic Sequence
  misc_feature (14)..(113): n is a, c, g, or u
guuuuuguacucunnnnnnnnnnnnnnnnnnnnnnnnnnnnnnnnnnnnnnnnnnnnnnnnnnnnnnnnnnnnnnnnnnnnnnnnnnnnnnnnnnnnnnnnnnnnnnnnnnnnagaagcuacaaagau

SEQ ID NO: 1359 - RNA, 122 nt, artificial  sequence
  Synthetic Sequence
  misc_feature (12)..(111): n is a, c, g, or u
guuguagcuccnnnnnnnnnnnnnnnnnnnnnnnnnnnnnnnnnnnnnnnnnnnnnnnnnnnnnnnnnnnnnnnnnnnnnnnnnnnnnnnnnnnnnnnnnnnnnnnnnnnnguugcuacaau

SEQ ID NO: 1360 - RNA, 42 nt, artificial  sequence
  Synthetic Sequence
guuuuagagcuagaaauagcaaguuaaaauaaggcuaguccg

SEQ ID NO: 1361 - RNA, 55 nt, artificial  sequence
  Synthetic Sequence
cucaccuuccuacggucacuauucaccuuacgguacacccgacaguuuuaacucg

SEQ ID NO: 1362 - RNA, 55 nt, artificial  sequence
  Synthetic Sequence
uugcacgacgccgaccgaccacuugaaggcuaucacgcccacaacuuacuaaagg

SEQ ID NO: 1363 - RNA, 55 nt, artificial  sequence
  Synthetic Sequence
aguguuguuacucaccgucuauaucggaccaccaaguccgccgcguaaaaauaac

SEQ ID NO: 1364 - protein, 34 aa, artificial  sequence
  Synthetic Sequence
IPYYVGPLARGNSRFAWMTRKSEETITPWNFEEV

SEQ ID NO: 1365 - protein, 34 aa, artificial  sequence
  Synthetic Sequence
IPYYVGPLARGNSDFAWSIRKRNEKITPWNFEDV

SEQ ID NO: 1366 - protein, 34 aa, artificial  sequence
  Synthetic Sequence
IPYFVGPLANGQSEFAWLTRKADGEIRPWNIEEK

SEQ ID NO: 1367 - protein, 34 aa, artificial  sequence
  Synthetic Sequence
IPYYIGPLAREKSDFAWMTRKTDDSIRPWNFEDL

SEQ ID NO: 1368 - protein, 34 aa, artificial  sequence
  Synthetic Sequence
IPYYVGPLARGKSDFAWLSRKSADKITPWNFDEI

SEQ ID NO: 1369 - protein, 36 aa, artificial  sequence
  Synthetic Sequence
IPYYVGPLAKKQENSPFAWLIRKSEEKIKPWNLPEI

SEQ ID NO: 1370 - protein, 26 aa, artificial  sequence
  Synthetic Sequence
RNSDKLIARKKDWDPKKYGGFDSPTV

SEQ ID NO: 1371 - protein, 39 aa, artificial  sequence
  Synthetic Sequence
GLFNANLSSKPKPNSNENLVGAKEYLDPKKYGGYAGISN

SEQ ID NO: 1372 - protein, 26 aa, artificial  sequence
  Synthetic Sequence
GNSSKLIPRKTNWDPMKYGGLDSPNM

SEQ ID NO: 1373 - protein, 29 aa, artificial  sequence
  Synthetic Sequence
GNSDKLIPRKTKDIYLDPKKYGGFDSPIV

SEQ ID NO: 1374 - protein, 29 aa, artificial  sequence
  Synthetic Sequence
GNSDKLIPRKTKKFYWDTKKYGGFDSPIV

SEQ ID NO: 1375 - protein, 26 aa, artificial  sequence
  Synthetic Sequence
KDSSKLLPRKNNWDPAKYGGLGSPNV

SEQ ID NO: 1376 - protein, 7 aa, artificial  sequence
  Synthetic Sequence
SRVAPDP

SEQ ID NO: 1377 - protein, 7 aa, artificial  sequence
  Synthetic Sequence
SGDAVQK

SEQ ID NO: 1378 - protein, 7 aa, artificial  sequence
  Synthetic Sequence
ALKDFSH

SEQ ID NO: 1379 - protein, 39 aa, artificial  sequence
  Synthetic Sequence
FPDRCWVVKKEKSPSGKTTPWNFFDHIDKEKTAEEFITS

SEQ ID NO: 1380 - protein, 32 aa, artificial  sequence
  Synthetic Sequence
AWSIRKRNEKITPWNFEDVIDKESSAEAFINR

SEQ ID NO: 1381 - protein, 32 aa, artificial  sequence
  Synthetic Sequence
AWLSRKSADKITPWNFDEIVDKESSAEAFINR

SEQ ID NO: 1382 - protein, 32 aa, artificial  sequence
  Synthetic Sequence
AWMTRKTDDSIRPWNFEDLVDKEKSAEAFIHR

SEQ ID NO: 1383 - protein, 32 aa, artificial  sequence
  Synthetic Sequence
AWMTRKSEETITPWNFEEVVDKGASAQSFIER

SEQ ID NO: 1384 - protein, 33 aa, artificial  sequence
  Synthetic Sequence
FSKRKKTDSDRDETPFGAIAVRGGFVEIGPSIH

SEQ ID NO: 1385 - protein, 26 aa, artificial  sequence
  Synthetic Sequence
EPFYKYDKAGNRTQQVKAVRVEQVQK

SEQ ID NO: 1386 - protein, 14 aa, artificial  sequence
  Synthetic Sequence
SYGGKEGVLKALEL

SEQ ID NO: 1387 - protein, 37 aa, artificial  sequence
  Synthetic Sequence
LGQHPLKKEGPFSNISKYGGYNKVSAAYYTLIEYEEK

SEQ ID NO: 1388 - protein, 37 aa, artificial  sequence
  Synthetic Sequence
NSNENLVGAKEYLDPKKYGGYAGISNSFTVLVKGTIE

SEQ ID NO: 1389 - protein, 39 aa, artificial  sequence
  Synthetic Sequence
NSDKLIPRKTKKFYWDTKKYGGFDSPIVAYSILVIADIE

SEQ ID NO: 1390 - protein, 39 aa, artificial  sequence
  Synthetic Sequence
NSDKLIPRKTKDIYLDPKKYGGFDSPIVAYSVLVVADIK

SEQ ID NO: 1391 - protein, 36 aa, artificial  sequence
  Synthetic Sequence
NSDKLIARKKDWDPKKYGGFDSPTVAYSVLVVAKVE

SEQ ID NO: 1392 - DNA, 23 bp, artificial  sequence
  Synthetic Sequence
ggcgcataaagatgagacgctgg

SEQ ID NO: 1393 - DNA, 23 bp, artificial  sequence
  Synthetic Sequence
ccagcgtctcatctttatgcgcc

SEQ ID NO: 1394 - DNA, 23 bp, artificial  sequence
  Synthetic Sequence
gtgataagtggaatgccatgtgg

SEQ ID NO: 1395 - DNA, 23 bp, artificial  sequence
  Synthetic Sequence
ccacatggcattccacttatcac

SEQ ID NO: 1396 - DNA, 23 bp, artificial  sequence
  Synthetic Sequence
ctggtgaacttccgatagtgcgg

SEQ ID NO: 1397 - DNA, 23 bp, artificial  sequence
  Synthetic Sequence
ccgcactatcggaagttcaccag

SEQ ID NO: 1398 - DNA, 23 bp, artificial  sequence
  Synthetic Sequence
cagatatagcctggtggttcagg

SEQ ID NO: 1399 - DNA, 23 bp, artificial  sequence
  Synthetic Sequence
cctgaaccaccaggctatatctg

SEQ ID NO: 1400 - DNA, 23 bp, artificial  sequence
  Synthetic Sequence
ggcaatgccgatggcgatagtgg

SEQ ID NO: 1401 - DNA, 23 bp, artificial  sequence
  Synthetic Sequence
ccactatcgccatcggcattgcc

SEQ ID NO: 1402 - DNA, 23 bp, artificial  sequence
  Synthetic Sequence
ggtgtgaaagaacaccaacaggg

SEQ ID NO: 1403 - DNA, 23 bp, artificial  sequence
  Synthetic Sequence
ccctgttggtgttctttcacacc

SEQ ID NO: 1404 - DNA, 17 bp, artificial  sequence
  Synthetic Sequence
taatacgactcactata

SEQ ID NO: 1405 - DNA, 59 bp, artificial  sequence
  Synthetic Sequence
caaaacagcatagctctaaaacgcgtctcatctttatgcgtctatagtgagtcgtatta

SEQ ID NO: 1406 - RNA, 42 nt, artificial  sequence
  Synthetic Sequence
gacgcauaaagaugagacgcguuuuagagcuaugcuguuuug

SEQ ID NO: 1407 - RNA, 42 nt, artificial  sequence
  Synthetic Sequence
gugauaaguggaaugccaugguuuuagagcuaugcuguuuug

SEQ ID NO: 1408 - RNA, 42 nt, artificial  sequence
  Synthetic Sequence
cuggugaacuuccgauagugguuuuagagcuaugcuguuuug

SEQ ID NO: 1409 - RNA, 42 nt, artificial  sequence
  Synthetic Sequence
cagauauagccuggugguucguuuuagagcuaugcuguuuug

SEQ ID NO: 1410 - DNA, 59 bp, artificial  sequence
  Synthetic Sequence
caaaacagcatagctctaaaacctatcgccatcggcattgcctatagtgagtcgtatta

SEQ ID NO: 1411 - RNA, 42 nt, artificial  sequence
  Synthetic Sequence
ggcaaugccgauggcgauagguuuuagagcuaugcuguuuug

SEQ ID NO: 1412 - DNA, 59 bp, artificial  sequence
  Synthetic Sequence
caaaacagcatagctctaaaactgttggtgttctttcacacctatagtgagtcgtatta

SEQ ID NO: 1413 - RNA, 42 nt, artificial  sequence
  Synthetic Sequence
ggugugaaagaacaccaacaguuuuagagcuaugcuguuuug

SEQ ID NO: 1414 - RNA, 42 nt, artificial  sequence; identical to SEQ ID NO: 280
  Synthetic Sequence

SEQ ID NO: 1415 - DNA, 90 bp, artificial  sequence
  Synthetic Sequence
aaaaagcaccgactcggtgccactttttcaagttgataacggactagccttattttaacttgctatgctgtcctatagtgagtcgtatta

SEQ ID NO: 1416 - RNA, 73 nt, artificial  sequence
  Synthetic Sequence
ggacagcauagcaaguuaaaauaaggcuaguccguuaucaacuugaaaaaguggcaccgagucggugcuuuuu

SEQ ID NO: 1417 - DNA, 55 bp, artificial  sequence
  Synthetic Sequence
agcagaaatctctgctgacgcataaagatgagacgctggagtacaaacgtcagct

SEQ ID NO: 1418 - DNA, 55 bp, artificial  sequence
  Synthetic Sequence
agctgacgtttgtactccagcgtctcatctttatgcgtcagcagagatttctgct

SEQ ID NO: 1419 - DNA, 55 bp, artificial  sequence
  Synthetic Sequence
gagtggaaggatgccagtgataagtggaatgccatgtgggctgtcaaaattgagc

SEQ ID NO: 1420 - DNA, 55 bp, artificial  sequence
  Synthetic Sequence
gctcaattttgacagcccacatggcattccacttatcactggcatccttccactc

SEQ ID NO: 1421 - DNA, 55 bp, artificial  sequence
  Synthetic Sequence
aacgtgctgcggctggctggtgaacttccgatagtgcgggtgttgaatgatttcc

SEQ ID NO: 1422 - DNA, 55 bp, artificial  sequence
  Synthetic Sequence
ggaaatcattcaacacccgcactatcggaagttcaccagccagccgcagcacgtt

SEQ ID NO: 1423 - DNA, 55 bp, artificial  sequence
  Synthetic Sequence
tcacaacaatgagtggcagatatagcctggtggttcaggcggcgcatttttattg

SEQ ID NO: 1424 - DNA, 55 bp, artificial  sequence
  Synthetic Sequence
caataaaaatgcgccgcctgaaccaccaggctatatctgccactcattgttgtga

SEQ ID NO: 1425 - DNA, 55 bp, artificial  sequence
  Synthetic Sequence
gaatgaacgatgcagaggcaatgccgatggcgatagtgggtatcatgtagccgct

SEQ ID NO: 1426 - DNA, 55 bp, artificial  sequence
  Synthetic Sequence
agcggctacatgatacccactatcgccatcggcattgcctctgcatcgttcattc

SEQ ID NO: 1427 - DNA, 55 bp, artificial  sequence
  Synthetic Sequence
aatcgatggtgtctccggtgtgaaagaacaccaacaggggtgttaccactaccgc

SEQ ID NO: 1428 - DNA, 55 bp, artificial  sequence
  Synthetic Sequence
gcggtagtggtaacacccctgttggtgttctttcacaccggagacaccatcgatt

SEQ ID NO: 1429 - DNA, 35 bp, artificial  sequence
  Synthetic Sequence
aattgaaagtgataagtggaatgccatgtggaaac

SEQ ID NO: 1430 - DNA, 35 bp, artificial  sequence
  Synthetic Sequence
gatcgtttccacatggcattccacttatcactttc

SEQ ID NO: 1431 - DNA, 55 bp, artificial  sequence
  Synthetic Sequence
agcagaaatctctgctgacgcataaagatgagacgctcgagtacaaacgtcagct

SEQ ID NO: 1432 - DNA, 55 bp, artificial  sequence
  Synthetic Sequence
agctgacgtttgtactcgagcgtctcatctttatgcgtcagcagagatttctgct

SEQ ID NO: 1433 - DNA, 55 bp, artificial  sequence
  Synthetic Sequence
agctgcataacgcgaaaaaatatatttatctgcttgatcttcaaatgttgtattg

SEQ ID NO: 1434 - DNA, 55 bp, artificial  sequence
  Synthetic Sequence
caatacaacatttgaagatcaagcagataaatatattttttcgcgttatgcagct

SEQ ID NO: 1435 - DNA, 55 bp, artificial  sequence
  Synthetic Sequence
agcagaaatctctgctctgcgtatttctactctgcgtggagtacaaacgtcagct

SEQ ID NO: 1436 - DNA, 55 bp, artificial  sequence
  Synthetic Sequence
agctgacgtttgtactccacgcagagtagaaatacgcagagcagagatttctgct

SEQ ID NO: 1437 - DNA, 55 bp, artificial  sequence
  Synthetic Sequence
agctgcataacgcgggaaaatccatttatctgcttgatcttcggatgttccattg

SEQ ID NO: 1438 - DNA, 55 bp, artificial  sequence
  Synthetic Sequence
caatggaacatccgaagatcaagcagataaatggattttcccgcgttatgcagct

SEQ ID NO: 1439 - DNA, 55 bp, artificial  sequence
  Synthetic Sequence
ggctgcaccacgcgggaaaatccatttaggtgcttcctcttcggatgttccattg

SEQ ID NO: 1440 - DNA, 55 bp, artificial  sequence
  Synthetic Sequence
caatggaacatccgaagaggaagcacctaaatggattttcccgcgtggtgcagcc

SEQ ID NO: 1441 - DNA, 55 bp, artificial  sequence
  Synthetic Sequence
ggctggaccacgcgggaaaatccacctaggtggttcctcttcggatgttccatcc

SEQ ID NO: 1442 - DNA, 55 bp, artificial  sequence
  Synthetic Sequence
ggatggaacatccgaagaggaaccacctaggtggattttcccgcgtggtccagcc

SEQ ID NO: 1443 - DNA, 55 bp, artificial  sequence
  Synthetic Sequence
agcagaaatctctgctctgcgtatttctactcacgctggagtacaaacgtcagct

SEQ ID NO: 1444 - DNA, 55 bp, artificial  sequence
  Synthetic Sequence
agctgacgtttgtactccagcgtgagtagaaatacgcagagcagagatttctgct

SEQ ID NO: 1445 - DNA, 55 bp, artificial  sequence
  Synthetic Sequence
agcagaaatctctgctctgcgtatttcttgagacgctggagtacaaacgtcagct

SEQ ID NO: 1446 - DNA, 55 bp, artificial  sequence
  Synthetic Sequence
agctgacgtttgtactccagcgtctcaagaaatacgcagagcagagatttctgct

SEQ ID NO: 1447 - DNA, 55 bp, artificial  sequence
  Synthetic Sequence
agcagaaatctctgctctgcgtataagatgagacgctggagtacaaacgtcagct

SEQ ID NO: 1448 - DNA, 55 bp, artificial  sequence
  Synthetic Sequence
agctgacgtttgtactccagcgtctcatcttatacgcagagcagagatttctgct

SEQ ID NO: 1449 - DNA, 55 bp, artificial  sequence
  Synthetic Sequence
agcagaaatctctgctctgccataaagatgagacgctggagtacaaacgtcagct

SEQ ID NO: 1450 - DNA, 55 bp, artificial  sequence
  Synthetic Sequence
agctgacgtttgtactccagcgtctcatctttatggcagagcagagatttctgct

SEQ ID NO: 1451 - DNA, 55 bp, artificial  sequence
  Synthetic Sequence
agcagaaatctctgctgacggtataagatgagacgctggagtacaaacgtcagct

SEQ ID NO: 1452 - DNA, 55 bp, artificial  sequence
  Synthetic Sequence
agctgacgtttgtactccagcgtctcatcttataccgtcagcagagatttctgct

SEQ ID NO: 1453 - DNA, 55 bp, artificial  sequence
  Synthetic Sequence
agcagaaatctctgctgacgcatattcttgagacgctggagtacaaacgtcagct

SEQ ID NO: 1454 - DNA, 55 bp, artificial  sequence
  Synthetic Sequence
agctgacgtttgtactccagcgtctcaagaatatgcgtcagcagagatttctgct

SEQ ID NO: 1455 - DNA, 55 bp, artificial  sequence
  Synthetic Sequence
agcagaaatctctgctgacgcataaagaactcacgctggagtacaaacgtcagct

SEQ ID NO: 1456 - DNA, 55 bp, artificial  sequence
  Synthetic Sequence
agctgacgtttgtactccagcgtgagttctttatgcgtcagcagagatttctgct

SEQ ID NO: 1457 - DNA, 55 bp, artificial  sequence
  Synthetic Sequence
agcagaaatctctgctgacgcataaagatgagtgcgtggagtacaaacgtcagct

SEQ ID NO: 1458 - DNA, 55 bp, artificial  sequence
  Synthetic Sequence
agctgacgtttgtactccacgcactcatctttatgcgtcagcagagatttctgct

SEQ ID NO: 1459 - DNA, 55 bp, artificial  sequence
  Synthetic Sequence
agcagaaatctctgctgacgcataaagatgagaccgtggagtacaaacgtcagct

SEQ ID NO: 1460 - DNA, 55 bp, artificial  sequence
  Synthetic Sequence
agctgacgtttgtactccacggtctcatctttatgcgtcagcagagatttctgct

SEQ ID NO: 1461 - DNA, 55 bp, artificial  sequence; identical to SEQ ID NO: 1417
  Synthetic Sequence

SEQ ID NO: 1462 - DNA, 55 bp, artificial  sequence; identical to SEQ ID NO: 1418
  Synthetic Sequence

SEQ ID NO: 1463 - DNA, 55 bp, artificial  sequence; identical to SEQ ID NO: 1419
  Synthetic Sequence

SEQ ID NO: 1464 - DNA, 55 bp, artificial  sequence; identical to SEQ ID NO: 1420
  Synthetic Sequence

SEQ ID NO: 1465 - DNA, 55 bp, artificial  sequence; identical to SEQ ID NO: 1420
  Synthetic Sequence

SEQ ID NO: 1466 - DNA, 19 bp, artificial  sequence
  Synthetic Sequence
tgggctgtcaaaattgagc

SEQ ID NO: 1467 - DNA, 72 bp, artificial  sequence
  Synthetic Sequence
ttcgaaagagtggaaggatgccagtgataagtggaatgccatgtgggctgtcaaaattgagcagaccaaaga

SEQ ID NO: 1468 - DNA, 72 bp, artificial  sequence
  Synthetic Sequence
tctttggtctgctcaattttgacagcccacatggcattccacttatcactggcatccttccactctttcgaa

SEQ ID NO: 1469 - DNA, 26 bp, artificial  sequence
  Synthetic Sequence
gctgtcaaaattgagcagaccaaaga

SEQ ID NO: 1470 - DNA, 29 bp, artificial  sequence
  Synthetic Sequence
tgggctgtcaaaattgagcagaccaaaga

SEQ ID NO: 1471 - DNA, 11 bp, artificial  sequence
  Synthetic Sequence
tgggctgtcaa

SEQ ID NO: 1472 - RNA, 37 nt, artificial  sequence
  Synthetic Sequence
uugacagcccacauggcauuccacuuaucacuggcau

SEQ ID NO: 1473 - DNA, 27 bp, artificial  sequence
  Synthetic Sequence
atgaccctaggggctcccccctgcaaa

SEQ ID NO: 1474 - DNA, 27 bp, artificial  sequence
  Synthetic Sequence
atgaccctaggggctcccccctgcaaa

SEQ ID NO: 1475 - DNA, 27 bp, artificial  sequence
  Synthetic Sequence
atgaccctaggggctcccccctgcaaa

SEQ ID NO: 1476 - DNA, 27 bp, artificial  sequence
  Synthetic Sequence
atgaccctaggggctcccccctgcaaa

SEQ ID NO: 1477 - DNA, 27 bp, artificial  sequence
  Synthetic Sequence
atgaccctaggggctcccccctgcaaa

SEQ ID NO: 1478 - DNA, 27 bp, artificial  sequence
  Synthetic Sequence
atgaccctaggggctcccccctgcaaa

SEQ ID NO: 1479 - DNA, 141 bp, artificial  sequence
  Synthetic Sequence
taatacgactcactataggtgataagtggaatgccatggttttagagctatgctgttttggaaacaaaacagcatagcaagttaaaataaggctagtccgttatcaacttgaaaaagtggcaccgagtcggtgcttttttt

SEQ ID NO: 1480 - RNA, 124 nt, artificial  sequence
  Synthetic Sequence
ggugauaaguggaaugccaugguuuuagagcuaugcuguuuuggaaacaaaacagcauagcaaguuaaaauaaggcuaguccguuaucaacuugaaaaaguggcaccgagucggugcuuuuuuu

SEQ ID NO: 1481 - DNA, 55 bp, artificial  sequence; identical to SEQ ID NO: 1420
  Synthetic Sequence

SEQ ID NO: 1482 - DNA, 73 bp, artificial  sequence
  Synthetic Sequence
gagtggaaggatgccagtgataagtggaatgccatgtgggctgtcaaaattgagcctatagtgagtcgtatta

SEQ ID NO: 1483 - RNA, 56 nt, artificial  sequence
  Synthetic Sequence
ggcucaauuuugacagcccacauggcauuccacuuaucacuggcauccuuccacuc

SEQ ID NO: 1484 - DNA, 73 bp, artificial  sequence
  Synthetic Sequence
gctcaattttgacagcccacatggcattccacttatcactggcatccttccactcctatagtgagtcgtatta

SEQ ID NO: 1485 - DNA, 56 bp, artificial  sequence
  Synthetic Sequence
ggagtggaaggatgccagtgataagtggaatgccatgtgggctgtcaaaattgagc

SEQ ID NO: 1486 - DNA, 18 bp, artificial  sequence
  Synthetic Sequence
gggctgtcaaaattgagc

SEQ ID NO: 1487 - DNA, 19 bp, artificial  sequence
  Synthetic Sequence
accgctgtcaaaattgagc

SEQ ID NO: 1488 - RNA, 18 nt, artificial  sequence
  Synthetic Sequence
gggcugucaaaauugagc

SEQ ID NO: 1489 - DNA, 10 bp, artificial  sequence
  Synthetic Sequence
tgggctgtca

SEQ ID NO: 1490 - DNA, 15 bp, artificial  sequence
  Synthetic Sequence
tgggctgtcaaaatt

SEQ ID NO: 1491 - DNA, 72 bp, artificial  sequence
  Synthetic Sequence
aacgtgctgcggctggctggtgaacttccgatagtgcgggtgttgaatgatttcctatagtgagtcgtatta

SEQ ID NO: 1492 - RNA, 55 nt, artificial  sequence
  Synthetic Sequence
ggaaaucauucaacacccgcacuaucggaaguucaccagccagccgcagcacguu

SEQ ID NO: 1493 - DNA, 74 bp, artificial  sequence
  Synthetic Sequence
tcacaacaatgagtggcagatatagcctggtggttcaggcggcgcatttttattgcctatagtgagtcgtatta

SEQ ID NO: 1494 - RNA, 57 nt, artificial  sequence
  Synthetic Sequence
ggcaauaaaaaugcgccgccugaaccaccaggcuauaucugccacucauuguuguga

SEQ ID NO: 1495 - DNA, 19 bp, artificial  sequence
  Synthetic Sequence
cgggtgttgaatgatttcc

SEQ ID NO: 1496 - DNA, 19 bp, artificial  sequence
  Synthetic Sequence
aggcggcgcatttttattg

SEQ ID NO: 1497 - DNA, 21 bp, artificial  sequence
  Synthetic Sequence
tgtgggctgtcaaaattgagc

SEQ ID NO: 1498 - DNA, 21 bp, artificial  sequence
  Synthetic Sequence
tgcgggtgttgaatgatttcc

SEQ ID NO: 1499 - DNA, 24 bp, artificial  sequence
  Synthetic Sequence
ccatgtgggctgtcaaaattgagc

SEQ ID NO: 1500 - DNA, 24 bp, artificial  sequence
  Synthetic Sequence
tagtgcgggtgttgaatgatttcc

SEQ ID NO: 1501 - DNA, 27 bp, artificial  sequence
  Synthetic Sequence
atgccatgtgggctgtcaaaattgagc

SEQ ID NO: 1502 - DNA, 27 bp, artificial  sequence
  Synthetic Sequence
cgatagtgcgggtgttgaatgatttcc

SEQ ID NO: 1503 - DNA, 30 bp, artificial  sequence
  Synthetic Sequence
ggaatgccatgtgggctgtcaaaattgagc

SEQ ID NO: 1504 - DNA, 30 bp, artificial  sequence
  Synthetic Sequence
ttccgatagtgcgggtgttgaatgatttcc

SEQ ID NO: 1505 - DNA, 33 bp, artificial  sequence
  Synthetic Sequence
agtggaatgccatgtgggctgtcaaaattgagc

SEQ ID NO: 1506 - DNA, 33 bp, artificial  sequence
  Synthetic Sequence
aacttccgatagtgcgggtgttgaatgatttcc

SEQ ID NO: 1507 - DNA, 36 bp, artificial  sequence
  Synthetic Sequence
ataagtggaatgccatgtgggctgtcaaaattgagc

SEQ ID NO: 1508 - DNA, 39 bp, artificial  sequence
  Synthetic Sequence
gtgataagtggaatgccatgtgggctgtcaaaattgagc

SEQ ID NO: 1509 - DNA, 39 bp, artificial  sequence
  Synthetic Sequence
ctggtgaacttccgatagtgcgggtgttgaatgatttcc

SEQ ID NO: 1510 - DNA, 55 bp, artificial  sequence
  Synthetic Sequence
gagtggaaggatgccagtgataagtggaatgccatgaccgctgtcaaaattgagc

SEQ ID NO: 1511 - DNA, 55 bp, artificial  sequence
  Synthetic Sequence
gctcaattttgacagcggtcatggcattccacttatcactggcatccttccactc

SEQ ID NO: 1512 - DNA, 73 bp, artificial  sequence
  Synthetic Sequence
gagtggaaggatgccagtgataagtggaatgccatgaccgctgtcaaaattgagcctatagtgagtcgtatta

SEQ ID NO: 1513 - RNA, 56 nt, artificial  sequence
  Synthetic Sequence
ggcucaauuuugacagcggucauggcauuccacuuaucacuggcauccuuccacuc

SEQ ID NO: 1514 - DNA, 19 bp, artificial  sequence
  Synthetic Sequence
tgggctgtcaaaattgagc

SEQ ID NO: 1515 - DNA, 19 bp, artificial  sequence
  Synthetic Sequence
tgggctgtcaaaattgagc

SEQ ID NO: 1516 - DNA, 19 bp, artificial  sequence
  Synthetic Sequence
tgggctgtcaaaattgagc

SEQ ID NO: 1517 - DNA, 19 bp, artificial  sequence
  Synthetic Sequence
tgggctgtcaaaattgagc

SEQ ID NO: 1518 - DNA, 19 bp, artificial  sequence
  Synthetic Sequence
tgggctgtcaaaattgagc

SEQ ID NO: 1519 - DNA, 130 bp, artificial  sequence
  Synthetic Sequence
taatacgactcactataggggcagagatgatgaccctgtttaagagctatgctggaaacagcatagcaagtttaaataaggctagtccgttatcaacttgaaaaagtggcaccgagtcggtgcttttttt

SEQ ID NO: 1520 - RNA, 113 nt, artificial  sequence
  Synthetic Sequence
ggggcagagaugaugacccuguuuaagagcuaugcuggaaacagcauagcaaguuuaaauaaggcuaguccguuaucaacuugaaaaaguggcaccgagucggugcuuuuuuu

SEQ ID NO: 1521 - DNA, 132 bp, artificial  sequence
  Synthetic Sequence
taatacgactcactataggccaaagttgtcatggatgacgtttaagagctatgctggaaacagcatagcaagtttaaataaggctagtccgttatcaacttgaaaaagtggcaccgagtcggtgcttttttt

SEQ ID NO: 1522 - RNA, 115 nt, artificial  sequence
  Synthetic Sequence
ggccaaaguugucauggaugacguuuaagagcuaugcuggaaacagcauagcaaguuuaaauaaggcuaguccguuaucaacuugaaaaaguggcaccgagucggugcuuuuuuu

SEQ ID NO: 1523 - RNA, 115 nt, artificial  sequence
  Synthetic Sequence
ggaugucaucauauuuggcaggguuuaagagcuaugcuggaaacagcauagcaaguuuaaauaaggcuaguccguuaucaacuugaaaaaguggcaccgagucggugcuuuuuuu

SEQ ID NO: 1524 - DNA, 132 bp, artificial  sequence
  Synthetic Sequence
taatacgactcactataggatgtcatcatatttggcagggtttaagagctatgctggaaacagcatagcaagtttaaataaggctagtccgttatcaacttgaaaaagtggcaccgagtcggtgcttttttt

SEQ ID NO: 1525 - DNA, 115 bp, artificial  sequence
  Synthetic Sequence
ggatgtcatcatatttggcagggtttaagagctatgctggaaacagcatagcaagtttaaataaggctagtccgttatcaacttgaaaaagtggcaccgagtcggtgcttttttt

SEQ ID NO: 1526 - DNA, 27 bp, artificial  sequence
  Synthetic Sequence
atgacccttggggctcccccctgcaaa

SEQ ID NO: 1527 - DNA, 27 bp, artificial  sequence
  Synthetic Sequence
tggatgaccggggccaggggtgctaag

SEQ ID NO: 1528 - DNA, 27 bp, artificial  sequence
  Synthetic Sequence
ttggcaggtggttctagacggcaggtc

SEQ ID NO: 1529 - DNA, 27 bp, artificial  sequence
  Synthetic Sequence
ccccagcgtggaaggtggaggagtggg

SEQ ID NO: 1530 - DNA, 27 bp, artificial  sequence
  Synthetic Sequence
atgaccctaggggctcccccctgcaaa

SEQ ID NO: 1531 - DNA, 21 bp, artificial  sequence
  Synthetic Sequence
ctcactgttctctccctccgc

SEQ ID NO: 1532 - DNA, 20 bp, artificial  sequence
  Synthetic Sequence
aggggtctacatggcaactg

SEQ ID NO: 1533 - DNA, 20 bp, artificial  sequence
  Synthetic Sequence
agaaaatctggcaccacacc

SEQ ID NO: 1534 - DNA, 20 bp, artificial  sequence
  Synthetic Sequence
ggagtacttgcgctcaggag

SEQ ID NO: 1535 - RNA, 86 nt, Streptococcus mutans
aaacaacacagcaaguuaaauaaggcagugauuuuuaauccaguccguacacaacuugaaaaagugcgcaccgauucggugcuuuu

SEQ ID NO: 1536 - RNA, 25 nt, Streptococcus mutans
agcaaguuaaaauaaggcuaguccg

SEQ ID NO: 1537 - RNA, 71 nt, Streptococcus thermophilus
aaacaacacagcgaguuaaauaaggcuuaguccguacucaacuugaaaagguggcaccgauucgguguuuu

SEQ ID NO: 1538 - RNA, 26 nt, Streptococcus thermophilus
cagcgaguuaaauaaggcuuaguccg

SEQ ID NO: 1539 - RNA, 82 nt, Streptococcus thermophilus
aaaucuugcagaagcuacaaagauaaggcuucaugccgaaaucaacacccugucauuuuauggcaggguguuuucguuauuu

SEQ ID NO: 1540 - RNA, 29 nt, Streptococcus thermophilus
agaagcuacaaagauaaggcuucaugccg

SEQ ID NO: 1541 - RNA, 95 nt, Neisseria meningitidis
aaaugagaaccguugcuacaauaaggccgucugaaaagaugugccgcaacgcucugccccuuaaagcuucugcuuuaaggggcaucguuuauuuc

SEQ ID NO: 1542 - RNA, 35 nt, Neisseria meningitidis
guugcuacaauaaggccgucugaaaagaugugccg

SEQ ID NO: 1543 - RNA, 89 nt, Pasteurella multocida
aaaugagagaguugcuacaauaaggcuucugaaaagaaugaccguaacgcucugccccuugugauucuuaauugcaaggggcaucguuu

SEQ ID NO: 1544 - RNA, 37 nt, Pasteurella multocida
agaguugcuacaauaaggcuucugaaaagaaugaccg

SEQ ID NO: 1545 - protein, 1367 aa, Streptococcus pyogenes
MDKKYSIGLDIGTNSVGWAVITDDYKVPSKKLKVLGNTDRHGIKKNLIGALLFDSGETAEATRLKRTARRRYTRRKNRICYLQEIFSNEMAKVDDSFFHRLEESFLVEEDKKHERHPIFGNIVDEVAYHEKYPTIYHLRKKLADSTDKVDLRLIYLALAHMIKFRGHFLIEGDLNPDNSDVDKLFIQLVQTYNQLFEENPINASRVDAKAILSARLSKSRRLENLIAQLPGEKKNGLFGNLIALSLGLTPNFKSNFDLAEDAKLQLSKDTYDDDLDNLLAQIGDQYADLFLAAKNLSDAILLSDILRVNSEITKAPLSASMIKRYDEHHQDLTLLKALVRQQLPEKYKEIFFDQSKNGYAGYIDGGASQEEFYKFIKPILEKMDGTEELLAKLNREDLLRKQRTFDNGSIPYQIHLGELHAILRRQEDFYPFLKDNREKIEKILTFRIPYYVGPLARGNSRFAWMTRKSEETITPWNFEEVVDKGASAQSFIERMTNFDKNLPNEKVLPKHSLLYEYFTVYNELTKVKYVTEGMRKPAFLSGEQKKAIVDLLFKTNRKVTVKQLKEDYFKKIECFDSVEISGVEDRFNTSLGTYHDLLKIIKDKDFLDNEENEDILEDIVLTLTLFEDKEMIEERLKKYANLFDDKVMKQLKRRHYTGWGRLSRKLINGIRDKQSGKTILDFLKSDGFANRNFMQLINDDSLTFKEAIQKAQVSGQGHSLHEQIANLAGSPAIKKGILQTVKIVDELVKVMGHKPENIVIEMARENQTTQKGQKNSRERMKRIEEGIKELGSQILKEHPVENTQLQNEKLYLYYLQNGRDMYVDQELDINRLSDYDVDHIVPQSFLKDDSIDNKVLTRSDKNRGKSDNVPSEEVVKKMKNYWRQLLNAKLITQRKFDNLTKAERGGLSELDKAGFIKRQLVETRQITKHVAQILDSRMNTKYDENDKLIREVKVITLKSKLVSDFRKDFQFYKVREINNYHHAHDAYLNAVVGTALIKKYPKLESEFVYGDYKVYDVRKMIAKSEQEIGKATAKYFFYSNIMNFFKTEITLANGEIRKRPLIETNGETGEIVWDKGRDFATVRKVLSMPQVNIVKKTEVQTGGFSKESILPKRNSDKLIARKKDWDPKKYGGFDSPTVAYSVLVVAKVEKGKSKKLKSVKELLGITIMERSSFEKNPIDFLEAKGYKEVRKDLIIKLPKYSLFELENGRKRMLASAGELQKGNELALPSKYVNFLYLASHYEKLKGSPEDNEQKQLFVEQHKHYLDEIIEQISEFSKRVILADANLDKVLSAYNKHRDKPIREQAKNIIHLFTLTNLGAPAAFKYFDTTIERNRYKSIKEVLDATLIHQSITGLYEIRIDLSQLGGD

SEQ ID NO: 1546 - protein, 17 aa, artificial  sequence
  Synthetic Sequence
MAPKKKRKVGIHGVPAA

SEQ ID NO: 1547 - protein, 16 aa, artificial  sequence
  Synthetic Sequence
KRPAATKKAGQAKKKK

SEQ ID NO: 1548 - protein, 5 aa, artificial  sequence
  Synthetic Sequence
GSGGS

SEQ ID NO: 1549 - protein, 4 aa, artificial  sequence
  Synthetic Sequence
GGGS

SEQ ID NO: 1550 - protein, 4 aa, artificial  sequence
  Synthetic Sequence
GGSG

SEQ ID NO: 1551 - protein, 5 aa, artificial  sequence
  Synthetic Sequence
GGSGG

SEQ ID NO: 1552 - protein, 5 aa, artificial  sequence
  Synthetic Sequence
GSGSG

SEQ ID NO: 1553 - protein, 5 aa, artificial  sequence
  Synthetic Sequence
GSGGG

SEQ ID NO: 1554 - protein, 5 aa, artificial  sequence
  Synthetic Sequence
GGGSG

SEQ ID NO: 1555 - protein, 5 aa, artificial  sequence
  Synthetic Sequence
GSSSG

SEQ ID NO: 1556 - protein, 47 aa, artificial  sequence
  Synthetic Sequence
NDLDAYEREAEKLEKKNEVLRNRLAALENELATLRQEVASMKQELQS

SEQ ID NO: 1557 - protein, 42 aa, artificial  sequence
  Synthetic Sequence
NEKEELKSKKAELRNRIEQLKQKREQLKQKIANLRKEIEAYK

SEQ ID NO: 1558 - protein, 41 aa, artificial  sequence
  Synthetic Sequence
SIAATLENDLARLENENARLEKDIANLERDLAKLEREEAYF

SEQ ID NO: 1559 - protein, 107 aa, artificial  sequence
  Synthetic Sequence
GVQVETISPGDGRTFPKRGQTCVVHYTGMLEDGKKFDSSRDRNKPFKFMLGKQEVIRGWEEGVAQMSVGQRAKLTISPDYAYGATGHPGIIPPHATLVFDVELLKLE

SEQ ID NO: 1560 - protein, 292 aa, artificial  sequence
  Synthetic Sequence
LEESVALRIITEGASILRQEKNLLDIDAPVTVCGDIHGQFFDLMKLFEVGGSPANTRYLFLGDYVDRGYFSIECVLYLWALKILYPKTLFLLRGNHECRHLTEYFTFKQECKIKYSERVYDACMDAFDCLPLAALMNQQFLCVHGGLSPEINTLDDIRKLDRFKEPPAYGPMCDILWSDPLEDFGNEKTQEHFTHNTVRGCSYFYSYPAVCEFLQHNNLLSILRAHEAQDAGYRMYRKSQTTGFPSLITIFSAPNYLDVYNNKAAVLKYENNVMNIRQFNCSPHPYWLPNFM

SEQ ID NO: 1561 - protein, 165 aa, artificial  sequence
  Synthetic Sequence
MVNPTVFFDIAVDGEPLGRVSFELFADKVPKTAENFRALSTGEKGFGYKGSCFHRIIPGFMCQGGDFTRHNGTGGKSIYGEKFEDENFILKHTGPGILSMANAGPNTNGSQFFICTAKTEWLDGKHVVFGKVKEGMNIVEAMERFGSRNGKTSKKITIADCGQLE

SEQ ID NO: 1562 - protein, 94 aa, artificial  sequence
  Synthetic Sequence
VAILWHEMWHEGLEEASRLYFGERNVKGMFEVLEPLHAMMERGPQTLKETSFNQAYGRDLMEAQEWCRKYMKSGNVKDLTQAWDLYYHVFRRIS

SEQ ID NO: 1563 - protein, 804 aa, artificial  sequence
  Synthetic Sequence
MSNSYDSSSIKVLKGLDAVRKRPGMYIGDTDDGTGLHHMVFEVVDNAIDEALAGHCKEIIVTIHADNSVSVQDDGRGIPTGIHPEEGVSAAEVIMTVLHAGGKFDDNSYKVSGGLHGVGVSVVNALSQKLELVIQREGKIHRQIYEHGVPQAPLAVTGETEKTGTMVRFWPSLETFTNVTEFEYEILAKRLRELSFLNSGVSIRLRDKRDGKEDHFHYEGGIKAFVEYLNKNKTPIHPNIFYFSTEKDGIGVEVALQWNDGFQENIYCFTNNIPQRDGGTHLAGFRAAMTRTLNAYMDKEGYSKKAKVSATGDDAREGLIAVVSVKVPDPKFSSQTKDKLVSSEVKSAVEQQMNELLAEYLLENPTDAKIVVGKIIDAARAREAARRAREMTRRKGALDLAGLPGKLADCQERDPALSELYLVEGDSAGGSAKQGRNRKNQAILPLKGKILNVEKARFDKMLSSQEVATLITALGCGIGRDEYNPDKLRYHSIIIMTDADVDGSHIRTLLLTFFYRQMPEIVERGHVYIAQPPLYKVKKGKQEQYIKDDEAMDQYQISIALDGATLHTNASAPALAGEALEKLVSEYNATQKMINRMERRYPKAMLKELIYQPTLTEADLSDEQTVTRWVNALVSELNDKEQHGSQWKFDVHTNAEQNLFEPIVRVRTHGVDTDYPLDHEFITGGEYRRICTLGEKLRGLLEEDAFIERGERRQPVASFEQALDWLVKESRRGLSIQRYKGLGEMNPEQLWETTMDPESRRMLRVTVKDAIAADQLFTTLMGDAVEPRRAFIEENALKAANIDI

SEQ ID NO: 1564 - protein, 187 aa, artificial  sequence
  Synthetic Sequence
MVGSLNCIVAVSQNMGIGKNGDLPWPPLRNEFRYFQRMTTTSSVEGKQNLVIMGKKTWFSIPEKNRPLKGRINLVLSRELKEPPQGAHFLSRSLDDALKLTEQPELANKVDMVWIVGGSSVYKEAMNHPGHLKLFVTRIMQDFESDTFFPEIDLEKYKLLPEYPGVLSDVQEEKGIKYKFEVYEKND

SEQ ID NO: 1565 - protein, 111 aa, artificial  sequence
  Synthetic Sequence
MASRGVQVETISPGDGRTFPKRGQTCVVHYTGMLEDGKKVDSSRDRNKPFKFMLGKQEVIRGWEEGVAQMSVGQRAKLTISPDYAYGATGHPGIIPPHATLVFDVELLKLE

SEQ ID NO: 1566 - protein, 183 aa, artificial  sequence
  Synthetic Sequence
MNGDETKKVESEYIKKHHRHELVESQCSSTLVKHIKAPLHLVWSIVRRFDEPQKYKPFISRCVVQGKKLEVGSVREVDLKSGLPATKSTEVLEILDDNEHILGIRIVGGDHRLKNYSSTISLHSETIDGKTGTLAIESFVVDVPEGNTKEETCFFVEALIQCNLNSLADVTERLQAESMEKKI

SEQ ID NO: 1567 - protein, 161 aa, artificial  sequence
  Synthetic Sequence
METSQKYHTCGSTLVQTIDAPLSLVWSILRRFDNPQAYKQFVKTCNLSSGDGGEGSVREVTVVSGLPAEFSRERLDELDDESHVMMISIIGGDHRLVNYRSKTMAFVAADTEEKTVVVESYVVDVPEGNSEEETTSFADTIVGFNLKSLAKLSERVAHLKL

SEQ ID NO: 1568 - protein, 159 aa, artificial  sequence
  Synthetic Sequence
MKTSQEQHVCGSTVVQTINAPLPLVWSILRRFDNPKTFKHFVKTCKLRSGDGGEGSVREVTVVSDLPASFSLERLDELDDESHVMVISIIGGDHRLVNYQSKTTVFVAAEEEKTVVVESYVVDVPEGNTEEETTLFADTIVGCNLRSLAKLSEKMMELT

SEQ ID NO: 1569 - protein, 164 aa, artificial  sequence
  Synthetic Sequence
MESSKQKRCRSSVVETIEAPLPLVWSILRSFDKPQAYQRFVKSCTMRSGGGGGKGGEGKGSVRDVTLVSGFPADFSTERLEELDDESHVMVVSIIGGNHRLVNYKSKTKVVASPEDMAKKTVVVESYVVDVPEGTSEEDTIFFVDNIIRYNLTSLAKLTKKMMK

SEQ ID NO: 1570 - protein, 221 aa, artificial  sequence
  Synthetic Sequence
MANSESSSSPVNEEENSQRISTLHHQTMPSDLTQDEFTQLSQSIAEFHTYQLGNGRCSSLLAQRIHAPPETVWSVVRRFDRPQIYKHFIKSCNVSEDFEMRVGCTRDVNVISGLPANTSRERLDLLDDDRRVTGFSITGGEHRLRNYKSVTTVHRFEKEEEEERIWTVVLESYVVDVPEGNSEEDTRLFADTVIRLNLQKLASITEAMNRNNNNNNSSQVR

SEQ ID NO: 1571 - protein, 190 aa, artificial  sequence
  Synthetic Sequence
MSSSPAVKGLTDEEQKTLEPVIKTYHQFEPDPTTCTSLITQRIHAPASVVWPLIRRFDNPERYKHFVKRCRLISGDGDVGSVREVTVISGLPASTSTERLEFVDDDHRVLSFRVVGGEHRLKNYKSVTSVNEFLNQDSGKVYTVVLESYTVDIPEGNTEEDTKMFVDTVVKLNLQKLGVAATSAPMHDDE

SEQ ID NO: 1572 - protein, 209 aa, artificial  sequence
  Synthetic Sequence
MNLAPIHDPSSSSTTTTSSSTPYGLTKDEFSTLDSIIRTHHTFPRSPNTCTSLIAHRVDAPAHAIWRFVRDFANPNKYKHFIKSCTIRVNGNGIKEIKVGTIREVSVVSGLPASTSVEILEVLDEEKRILSFRVLGGEHRLNNYRSVTSVNEFVVLEKDKKKRVYSVVLESYIVDIPQGNTEEDTRMFVDTVVKSNLQNLAVISTASPT

SEQ ID NO: 1573 - protein, 207 aa, artificial  sequence
  Synthetic Sequence
MLAVHRPSSAVSDGDSVQIPMMIASFQKRFPSLSRDSTAARFHTHEVGPNQCCSAVIQEISAPISTVWSVVRRFDNPQAYKHFLKSCSVIGGDGDNVGSLRQVHVVSGLPAASSTERLDILDDERHVISFSVVGGDHRLSNYRSVTTLHPSPISGTVVVESYVVDVPPGNTKEETCDFVDVIVRCNLQSLAKIAENTAAESKKKMSL

SEQ ID NO: 1574 - protein, 203 aa, artificial  sequence
  Synthetic Sequence
MRSPVQLQHGSDATNGFHTLQPHDQTDGPIKRVCLTRGMHVPEHVAMHHTHDVGPDQCCSSVVQMIHAPPESVWALVRRFDNPKVYKNFIRQCRIVQGDGLHVGDLREVMVVSGLPAVSSTERLEILDEERHVISFSVVGGDHRLKNYRSVTTLHASDDEGTVVVESYIVDVPPGNTEEETLSFVDTIVRCNLQSLARSTNRQ

SEQ ID NO: 1575 - protein, 215 aa, artificial  sequence
  Synthetic Sequence
MPTSIQFQRSSTAAEAANATVRNYPHHHQKQVQKVSLTRGMADVPEHVELSHTHVVGPSQCFSVVVQDVEAPVSTVWSILSRFEHPQAYKHFVKSCHVVIGDGREVGSVREVRVVSGLPAAFSLERLEIMDDDRHVISFSVVGGDHRLMNYKSVTTVHESEEDSDGKKRTRVVESYVVDVPAGNDKEETCSFADTIVRCNLQSLAKLAENTSKFS

SEQ ID NO: 1576 - protein, 211 aa, artificial  sequence
  Synthetic Sequence
MEMIGGDDTDTEMYGALVTAQSLRLRHLHHCRENQCTSVLVKYIQAPVHLVWSLVRRFDQPQKYKPFISRCTVNGDPEIGCLREVNVKSGLPATTSTERLEQLDDEEHILGINIIGGDHRLKNYSSILTVHPEMIDGRSGTMVMESFVVDVPQGNTKDDTCYFVESLIKCNLKSLACVSERLAAQDITNSIATFCNASNGYREKNHTETNL

SEQ ID NO: 1577 - protein, 188 aa, artificial  sequence
  Synthetic Sequence
MEANGIENLTNPNQEREFIRRHHKHELVDNQCSSTLVKHINAPVHIVWSLVRRFDQPQKYKPFISRCVVKGNMEIGTVREVDVKSGLPATRSTERLELLDDNEHILSIRIVGGDHRLKNYSSIISLHPETIEGRIGTLVIESFVVDVPEGNTKDETCYFVEALIKCNLKSLADISERLAVQDTTESRV

SEQ ID NO: 1578 - protein, 187 aa, artificial  sequence
  Synthetic Sequence
MMDGVEGGTAMYGGLETVQYVRTHHQHLCRENQCTSALVKHIKAPLHLVWSLVRRFDQPQKYKPFVSRCTVIGDPEIGSLREVNVKSGLPATTSTERLELLDDEEHILGIKIIGGDHRLKNYSSILTVHPEIIEGRAGTMVIESFVVDVPQGNTKDETCYFVEALIRCNLKSLADVSERLASQDITQ

SEQ ID NO: 1579 - protein, 191 aa, artificial  sequence
  Synthetic Sequence
MPSELTPEERSELKNSIAEFHTYQLDPGSCSSLHAQRIHAPPELVWSIVRRFDKPQTYKHFIKSCSVEQNFEMRVGCTRDVIVISGLPANTSTERLDILDDERRVTGFSIIGGEHRLTNYKSVTTVHRFEKENRIWTVVLESYVVDMPEGNSEDDTRMFADTVVKLNLQKLATVAEAMARNSGDGSGSQVT

SEQ ID NO: 1580 - protein, 434 aa, artificial  sequence
  Synthetic Sequence
MEEVSPAIAGPFRPFSETQMDFTGIRLGKGYCNNQYSNQDSENGDLMVSLPETSSCSVSGSHGSESRKVLISRINSPNLNMKESAAADIVVVDISAGDEINGSDITSEKKMISRTESRSLFEFKSVPLYGFTSICGRRPEMEDAVSTIPRFLQSSSGSMLDGRFDPQSAAHFFGVYDGHGGSQVANYCRERMHLALAEEIAKEKPMLCDGDTWLEKWKKALFNSFLRVDSEIESVAPETVGSTSVVAVVFPSHIFVANCGDSRAVLCRGKTALPLSVDHKPDREDEAARIEAAGGKVIQWNGARVFGVLAMSRSIGDRYLKPSIIPDPEVTAVKRVKEDDCLILASDGVWDVMTDEEACEMARKRILLWHKKNAVAGDASLLADERRKEGKDPAAMSAAEYLSKLAIQRGSKDNISVVVVDLKPRRKLKSKPLN

SEQ ID NO: 1581 - protein, 423 aa, artificial  sequence
  Synthetic Sequence
MDEVSPAVAVPFRPFTDPHAGLRGYCNGESRVTLPESSCSGDGAMKDSSFEINTRQDSLTSSSSAMAGVDISAGDEINGSDEFDPRSMNQSEKKVLSRTESRSLFEFKCVPLYGVTSICGRRPEMEDSVSTIPRFLQVSSSSLLDGRVTNGFNPHLSAHFFGVYDGHGGSQVANYCRERMHLALTEEIVKEKPEFCDGDTWQEKWKKALFNSFMRVDSEIETVAHAPETVGSTSVVAVVFPTHIFVANCGDSRAVLCRGKTPLALSVDHKPDRDDEAARIEAAGGKVIRWNGARVFGVLAMSRSIGDRYLKPSVIPDPEVTSVRRVKEDDCLILASDGLWDVMTNEEVCDLARKRILLWHKKNAMAGEALLPAEKRGEGKDPAAMSAAEYLSKMALQKGSKDNISVVVVDLKGIRKFKSKSLN

SEQ ID NO: 1582 - protein, 612 aa, artificial  sequence
  Synthetic Sequence
MKMDKKTIVWFRRDLRIEDNPALAAAAHEGSVFPVFIWCPEEEGQFYPGRASRWWMKQSLAHLSQSLKALGSDLTLIKTHNTISAILDCIRVTGATKVVFNHLYDPVSLVRDHTVKEKLVERGISVQSYNGDLLYEPWEIYCEKGKPFTSFNSYWKKCLDMSIESVMLPPPWRLMPITAAAEAIWACSIEELGLENEAEKPSNALLTRAWSPGWSNADKLLNEFIEKQLIDYAKNSKKVVGNSTSLLSPYLHFGEISVRHVFQCARMKQIIWARDKNSEGEESADLFLRGIGLREYSRYICFNFPFTHEQSLLSHLRFFPWDADVDKFKAWRQGRTGYPLVDAGMRELWATGWMHNRIRVIVSSFAVKFLLLPWKWGMKYFWDTLLDADLECDILGWQYISGSIPDGHELDRLDNPALQGAKYDPEGEYIRQWLPELARLPTEWIHHPWDAPLTVLKASGVELGTNYAKPIVDIDTARELLAKAISRTREAQIMIGAAPDEIVADSFEALGANTIKEPGLCPSVSSNDQQVPSAVRYNGSKRVKPEEEEERDMKKSRGFDERELFSTAESSSSSSVFFVSQSCSLASEGKNLEGIQDSSDQITTSLGKNGCK

SEQ ID NO: 1583 - protein, 335 aa, artificial  sequence
  Synthetic Sequence
MNGAIGGDLLLNFPDMSVLERQRAHLKYLNPTFDSPLAGFFADSSMITGGEMDSYLSTAGLNLPMMYGETTVEGDSRLSISPETTLGTGNFKKRKFDTETKDCNEKKKKMTMNRDDLVEEGEEEKSKITEQNNGSTKSIKKMKHKAKKEENNFSNDSSKVTKELEKTDYIHVRARRGQATDSHSIAERVRREKISERMKFLQDLVPGCDKITGKAGMLDEIINYVQSLQRQIEFLSMKLAIVNPRPDFDMDDIFAKEVASTPMTVVPSPEMVLSGYSHEMVHSGYSSEMVNSGYLHVNPMQQVNTSSDPLSCFNNGEAPSMWDSHVQNLYGNLGV

SEQ ID NO: 1584 - protein, 533 aa, artificial  sequence
  Synthetic Sequence
MKRDHHHHHHQDKKTMMMNEEDDGNGMDELLAVLGYKVRSSEMADVAQKLEQLEVMMSNVQEDDLSQLATETVHYNPAELYTWLDSMLTDLNPPSSNAEYDLKAIPGDAILNQFAIDSASSSNQGGGGDTYTTNKRLKCSNGVVETTTATAESTRHVVLVDSQENGVRLVHALLACAEAVQKENLTVAEALVKQIGFLAVSQIGAMRKVATYFAEALARRIYRLSPSQSPIDHSLSDTLQMHFYETCPYLKFAHFTANQAILEAFQGKKRVHVIDFSMSQGLQWPALMQALALRPGGPPVFRLTGIGPPAPDNFDYLHEVGCKLAHLAEAIHVEFEYRGFVANTLADLDASMLELRPSEIESVAVNSVFELHKLLGRPGAIDKVLGVVNQIKPEIFTVVEQESNHNSPIFLDRFTESLHYYSTLFDSLEGVPSGQDKVMSEVYLGKQICNVVACDGPDRVERHETLSQWRNRFGSAGFAAAHIGSNAFKQASMLLALFNGGEGYRVEESDGCLMLGWHTRPLIATSAWKLSTN

SEQ ID NO: 1585 - protein, 345 aa, artificial  sequence
  Synthetic Sequence
MAASDEVNLIESRTVVPLNTWVLISNFKVAYNILRRPDGTFNRHLAEYLDRKVTANANPVDGVFSFDVLIDRRINLLSRVYRPAYADQEQPPSILDLEKPVDGDIVPVILFFHGGSFAHSSANSAIYDTLCRRLVGLCKCVVVSVNYRRAPENPYPCAYDDGWIALNWVNSRSWLKSKKDSKVHIFLAGDSSGGNIAHNVALRAGESGIDVLGNILLNPMFGGNERTESEKSLDGKYFVTVRDRDWYWKAFLPEGEDREHPACNPFSPRGKSLEGVSFPKSLVVVAGLDLIRDWQLAYAEGLKKAGQEVKLMHLEKATVGFYLLPNNNHFHNVMDEISAFVNAEC

SEQ ID NO: 1586 - protein, 358 aa, artificial  sequence
  Synthetic Sequence
MAGGNEVNLNECKRIVPLNTWVLISNFKLAYKVLRRPDGSFNRDLAEFLDRKVPANSFPLDGVFSFDHVDSTTNLLTRIYQPASLLHQTRHGTLELTKPLSTTEIVPVLIFFHGGSFTHSSANSAIYDTFCRRLVTICGVVVVSVDYRRSPEHRYPCAYDDGWNALNWVKSRVWLQSGKDSNVYVYLAGDSSGGNIAHNVAVRATNEGVKVLGNILLHPMFGGQERTQSEKTLDGKYFVTIQDRDWYWRAYLPEGEDRDHPACNPFGPRGQSLKGVNFPKSLVVVAGLDLVQDWQLAYVDGLKKTGLEVNLLYLKQATIGFYFLPNNDHFHCLMEELNKFVHSIEDSQSKSSPVLLTP

SEQ ID NO: 1587 - protein, 344 aa, artificial  sequence
  Synthetic Sequence
MAGSEEVNLIESKTVVPLNTWVLISNFKLAYNLLRRPDGTFNRHLAEFLDRKVPANANPVNGVFSFDVIIDRQTNLLSRVYRPADAGTSPSITDLQNPVDGEIVPVIVFFHGGSFAHSSANSAIYDTLCRRLVGLCGAVVVSVNYRRAPENRYPCAYDDGWAVLKWVNSSSWLRSKKDSKVRIFLAGDSSGGNIVHNVAVRAVESRIDVLGNILLNPMFGGTERTESEKRLDGKYFVTVRDRDWYWRAFLPEGEDREHPACSPFGPRSKSLEGLSFPKSLVVVAGLDLIQDWQLKYAEGLKKAGQEVKLLYLEQATIGFYLLPNNNHFHTVMDEIAAFVNAECQ

SEQ ID NO: 1588 - protein, 1368 aa, artificial  sequence
  Synthetic Sequence
MDKKYSIGLDIGTNSVGWAVITDEYKVPSKKFKVLGNTDRHSIKKNLIGALLFDSGETAEATRLKRTARRRYTRRKNRICYLQEIFSNEMAKVDDSFFHRLEESFLVEEDKKHERHPIFGNIVDEVAYHEKYPTIYHLRKKLVDSTDKADLRLIYLALAHMIKFRGHFLIEGDLNPDNSDVDKLFIQLVQTYNQLFEENPINASGVDAKAILSARLSKSRRLENLIAQLPGEKKNGLFGNLIALSLGLTPNFKSNFDLAEDAKLQLSKDTYDDDLDNLLAQIGDQYADLFLAAKNLSDAILLSDILRVNTEITKAPLSASMIKRYDEHHQDLTLLKALVRQQLPEKYKEIFFDQSKNGYAGYIDGGASQEEFYKFIKPILEKMDGTEELLVKLNREDLLRKQRTFDNGSIPHQIHLGELHAILRRQEDFYPFLKDNREKIEKILTFRIPYYVGPLARGNSRFAWMTRKSEETITPWNFEEVVDKGASAQSFIERMTNFDKNLPNEKVLPKHSLLYEYFTVYNELTKVKYVTEGMRKPAFLSGEQKKAIVDLLFKTNRKVTVKQLKEDYFKKIECFDSVEISGVEDRFNASLGTYHDLLKIIKDKDFLDNEENEDILEDIVLTLTLFEDREMIEERLKTYAHLFDDKVMKQLKRRRYTGWGRLSRKLINGIRDKQSGKTILDFLKSDGFANRNFMQLIHDDSLTFKEDIQKAQVSGQGDSLHEHIANLAGSPAIKKGILQTVKVVDELVKVMGRHKPENIVIEMARENQTTQKGQKNSRERMKRIEEGIKELGSQILKEHPVENTQLQNEKLYLYYLQNGRDMYVDQELDINRLSDYDVDHIVPQSFLKDDSIDNKVLTRSDKNRGKSDNVPSEEVVKKMKNYWRQLLNAKLITQRKFDNLTKAERGGLSELDKAGFIKRQLVPTRQITKHVAQILDSRMNTKYDENDKLIREVKVITLKSKLVSDFRKDFQFYKVREINNYHHAHDAYLNAVVGTALIKKYPKLESEFVYGDYKVYDVRKMIAKSEQEIGKATAKYFFYSNIMNFFKTEITLANGEIRKRPLIETNGETGEIVWDKGRDFATVRKVLSMPQVNIVKKTEVQTGGFSKESILPKRNSDKLIARKKDWDPKKYGGFDSPTVAYSVLVVAKVEKGKSKKLKSVKELLGITIMERSSFEKNPIDFLEAKGYKEVKKDLIIKLPKYSLFELENGRKRMLASAGELQKGNELALPSKYVNFLYLASHYEKLKGSPEDNEQKQLFVEQHKHYLDEIIEQISEFSKRVILADANLDKVLSAYNKHRDKPIREQAENIIHLFTLTNLGAPAAFKYFDTTIDRKRYTSTKEVLDATLIHQSITGLYETRIDLSQLGGD

SEQ ID NO: 1589 - protein, 1368 aa, artificial  sequence
  Synthetic Sequence
MDKKYSIGLDIGTNSVGWAVITDEYKVPSKKFKVLGNTDRHSIKKNLIGALLFDSGETAEATRLKRTARRRYTRRKNRICYLQEIFSNEMAKVDDSFFHRLEESFLVEEDKKHERHPIFGNIVDEVAYHEKYPTIYHLRKKLVDSTDKADLRLIYLALAHMIKFRGHFLIEGDLNPDNSDVDKLFIQLVQTYNQLFEENPINASGVDAKAILSARLSKSRRLENLIAQLPGEKKNGLFGNLIALSLGLTPNFKSNFDLAEDAKLQLSKDTYDDDLDNLLAQIGDQYADLFLAAKNLSDAILLSDILRVNTEITKAPLSASMIKRYDEHHQDLTLLKALVRQQLPEKYKEIFFDQSKNGYAGYIDGGASQEEFYKFIKPILEKMDGTEELLVKLNREDLLRKQRTFDNGSIPHQIHLGELHAILRRQEDFYPFLKDNREKIEKILTFRIPYYVGPLARGNSRFAWMTRKSEETITPWNFEEVVDKGASAQSFIERMTNFDKNLPNEKVLPKHSLLYEYFTVYNELTKVKYVTEGMRKPAFLSGEQKKAIVDLLFKTNRKVTVKQLKEDYFKKIECFDSVEISGVEDRFNASLGTYHDLLKIIKDKDFLDNEENEDILEDIVLTLTLFEDREMIEERLKTYAHLFDDKVMKQLKRRRYTGWGRLSRKLINGIRDKQSGKTILDFLKSDGFANRNFMQLIHDDSLTFKEDIQKAQVSGQGDSLHEHIANLAGSPAIKKGILQTVKVVDELVKVMGRHKPENIVIEMARENQTTQKGQKNSRERMKRIEEGIKELGSQILKEHPVENTQLQNEKLYLYYLQNGRDMYVDQELDINRLSDYDVDHIVPQSFLKDDSIDNKVLTRSDKNRGKSDNVPSEEVVKKMKNYWRQLLNAKLITQRKFDNLTKAERGGLSELDKAGFIKRQLVETPQITKHVAQILDSRMNTKYDENDKLIREVKVITLKSKLVSDFRKDFQFYKVREINNYHHAHDAYLNAVVGTALIKKYPKLESEFVYGDYKVYDVRKMIAKSEQEIGKATAKYFFYSNIMNFFKTEITLANGEIRKRPLIETNGETGEIVWDKGRDFATVRKVLSMPQVNIVKKTEVQTGGFSKESILPKRNSDKLIARKKDWDPKKYGGFDSPTVAYSVLVVAKVEKGKSKKLKSVKELLGITIMERSSFEKNPIDFLEAKGYKEVKKDLIIKLPKYSLFELENGRKRMLASAGELQKGNELALPSKYVNFLYLASHYEKLKGSPEDNEQKQLFVEQHKHYLDEIIEQISEFSKRVILADANLDKVLSAYNKHRDKPIREQAENIIHLFTLTNLGAPAAFKYFDTTIDRKRYTSTKEVLDATLIHQSITGLYETRIDLSQLGGD

SEQ ID NO: 1590 - protein, 1368 aa, artificial  sequence
  Synthetic Sequence
MDKKYSIGLDIGTNSVGWAVITDEYKVPSKKFKVLGNTDRHSIKKNLIGALLFDSGETAEATRLKRTARRRYTRRKNRICYLQEIFSNEMAKVDDSFFHRLEESFLVEEDKKHERHPIFGNIVDEVAYHEKYPTIYHLRKKLVDSTDKADLRLIYLALAHMIKFRGHFLIEGDLNPDNSDVDKLFIQLVQTYNQLFEENPINASGVDAKAILSARLSKSRRLENLIAQLPGEKKNGLFGNLIALSLGLTPNFKSNFDLAEDAKLQLSKDTYDDDLDNLLAQIGDQYADLFLAAKNLSDAILLSDILRVNTEITKAPLSASMIKRYDEHHQDLTLLKALVRQQLPEKYKEIFFDQSKNGYAGYIDGGASQEEFYKFIKPILEKMDGTEELLVKLNREDLLRKQRTFDNGSIPHQIHLGELHAILRRQEDFYPFLKDNREKIEKILTFRIPYYVGPLARGNSRFAWMTRKSEETITPWNFEEVVDKGASAQSFIERMTNFDKNLPNEKVLPKHSLLYEYFTVYNELTKVKYVTEGMRKPAFLSGEQKKAIVDLLFKTNRKVTVKQLKEDYFKKIECFDSVEISGVEDRFNASLGTYHDLLKIIKDKDFLDNEENEDILEDIVLTLTLFEDREMIEERLKTYAHLFDDKVMKQLKRRRYTGWGRLSRKLINGIRDKQSGKTILDFLKSDGFANRNFMQLIHDDSLTFKEDIQKAQVSGQGDSLHEHIANLAGSPAIKKGILQTVKVVDELVKVMGRHKPENIVIEMARENQTTQKGQKNSRERMKRIEEGIKELGSQILKEHPVENTQLQNEKLYLYYLQNGRDMYVDQELDINRLSDYDVDHIVPQSFLKDDSIDNKVLTRSDKNRGKSDNVPSEEVVKKMKNYWRQLLNAKLITQRKFDNLTKAERGGLSELDKAGFIKRQLVPPRQITKHVAQILDSRMNTKYDENDKLIREVKVITLKSKLVSDFRKDFQFYKVREINNYHHAHDAYLNAVVGTALIKKYPKLESEFVYGDYKVYDVRKMIAKSEQEIGKATAKYFFYSNIMNFFKTEITLANGEIRKRPLIETNGETGEIVWDKGRDFATVRKVLSMPQVNIVKKTEVQTGGFSKESILPKRNSDKLIARKKDWDPKKYGGFDSPTVAYSVLVVAKVEKGKSKKLKSVKELLGITIMERSSFEKNPIDFLEAKGYKEVKKDLIIKLPKYSLFELENGRKRMLASAGELQKGNELALPSKYVNFLYLASHYEKLKGSPEDNEQKQLFVEQHKHYLDEIIEQISEFSKRVILADANLDKVLSAYNKHRDKPIREQAENIIHLFTLTNLGAPAAFKYFDTTIDRKRYTSTKEVLDATLIHQSITGLYETRIDLSQLGGD

SEQ ID NO: 1591 - protein, 1368 aa, artificial  sequence
  Synthetic Sequence
MDKKYSIGLDIGTNSVGWAVITDEYKVPSKKFKVLGNTDRHSIKKNLIGALLFDSGETAEATRLKRTARRRYTRRKNRICYLQEIFSNEMAKVDDSFFHRLEESFLVEEDKKHERHPIFGNIVDEVAYHEKYPTIYHLRKKLVDSTDKADLRLIYLALAHMIKFRGHFLIEGDLNPDNSDVDKLFIQLVQTYNQLFEENPINASGVDAKAILSARLSKSRRLENLIAQLPGEKKNGLFGNLIALSLGLTPNFKSNFDLAEDAKLQLSKDTYDDDLDNLLAQIGDQYADLFLAAKNLSDAILLSDILRVNTEITKAPLSASMIKRYDEHHQDLTLLKALVRQQLPEKYKEIFFDQSKNGYAGYIDGGASQEEFYKFIKPILEKMDGTEELLVKLNREDLLRKQRTFDNGSIPHQIHLGELHAILRRQEDFYPFLKDNREKIEKILTFRIPYYVGPLARGNSRFAWMTRKSEETITPWNFEEVVDKGASAQSFIERMTNFDKNLPNEKVLPKHSLLYEYFTVYNELTKVKYVTEGMRKPAFLSGEQKKAIVDLLFKTNRKVTVKQLKEDYFKKIECFDSVEISGVEDRFNASLGTYHDLLKIIKDKDFLDNEENEDILEDIVLTLTLFEDREMIEERLKTYAHLFDDKVMKQLKRRRYTGWGRLSRKLINGIRDKQSGKTILDFLKSDGFANRNFMQLIHDDSLTFKEDIQKAQVSGQGDSLHEHIANLAGSPAIKKGILQTVKVVDELVKVMGRHKPENIVIEMARENQTTQKGQKNSRERMKRIEEGIKELGSQILKEHPVENTQLQNEKLYLYYLQNGRDMYVDQELDINRLSDYDVDHIVPQSFLKDDSIDNKVLTRSDKNRGKSDNVPSEEVVKKMKNYWRQLLNAKLITQRKFDNLTKAERGGLSELDKAGFIKRQPVETRQITKHVAQILDSRMNTKYDENDKLIREVKVITLKSKLVSDFRKDFQFYKVREINNYHHAHDAYLNAVVGTALIKKYPKLESEFVYGDYKVYDVRKMIAKSEQEIGKATAKYFFYSNIMNFFKTEITLANGEIRKRPLIETNGETGEIVWDKGRDFATVRKVLSMPQVNIVKKTEVQTGGFSKESILPKRNSDKLIARKKDWDPKKYGGFDSPTVAYSVLVVAKVEKGKSKKLKSVKELLGITIMERSSFEKNPIDFLEAKGYKEVKKDLIIKLPKYSLFELENGRKRMLASAGELQKGNELALPSKYVNFLYLASHYEKLKGSPEDNEQKQLFVEQHKHYLDEIIEQISEFSKRVILADANLDKVLSAYNKHRDKPIREQAENIIHLFTLTNLGAPAAFKYFDTTIDRKRYTSTKEVLDATLIHQSITGLYETRIDLSQLGGD

SEQ ID NO: 1592 - protein, 1368 aa, artificial  sequence
  Synthetic Sequence
MDKKYSIGLDIGTNSVGWAVITDEYKVPSKKFKVLGNTDRHSIKKNLIGALLFDSGETAEATRLKRTARRRYTRRKNRICYLQEIFSNEMAKVDDSFFHRLEESFLVEEDKKHERHPIFGNIVDEVAYHEKYPTIYHLRKKLVDSTDKADLRLIYLALAHMIKFRGHFLIEGDLNPDNSDVDKLFIQLVQTYNQLFEENPINASGVDAKAILSARLSKSRRLENLIAQLPGEKKNGLFGNLIALSLGLTPNFKSNFDLAEDAKLQLSKDTYDDDLDNLLAQIGDQYADLFLAAKNLSDAILLSDILRVNTEITKAPLSASMIKRYDEHHQDLTLLKALVRQQLPEKYKEIFFDQSKNGYAGYIDGGASQEEFYKFIKPILEKMDGTEELLVKLNREDLLRKQRTFDNGSIPHQIHLGELHAILRRQEDFYPFLKDNREKIEKILTFRIPYYVGPLARGNSRFAWMTRKSEETITPWNFEEVVDKGASAQSFIERMTNFDKNLPNEKVLPKHSLLYEYFTVYNELTKVKYVTEGMRKPAFLSGEQKKAIVDLLFKTNRKVTVKQLKEDYFKKIECFDSVEISGVEDRFNASLGTYHDLLKIIKDKDFLDNEENEDILEDIVLTLTLFEDREMIEERLKTYAHLFDDKVMKQLKRRRYTGWGRLSRKLINGIRDKQSGKTILDFLKSDGFANRNFMQLIHDDSLTFKEDIQKAQVSGQGDSLHEHIANLAGSPAIKKGILQTVKVVDELVKVMGRHKPENIVIEMARENQTTQKGQKNSRERMKRIEEGIKELGSQILKEHPVENTQLQNEKLYLYYLQNGRDMYVDQELDINRLSDYDVDHIVPQSFLKDDSIDNKVLTRSDKNRGKSDNVPSEEVVKKMKNYWRQLLNAKLITQRKFDNLTKAERGGLSELDKAPPIKRQLVETRQITKHVAQILDSRMNTKYDENDKLIREVKVITLKSKLVSDFRKDFQFYKVREINNYHHAHDAYLNAVVGTALIKKYPKLESEFVYGDYKVYDVRKMIAKSEQEIGKATAKYFFYSNIMNFFKTEITLANGEIRKRPLIETNGETGEIVWDKGRDFATVRKVLSMPQVNIVKKTEVQTGGFSKESILPKRNSDKLIARKKDWDPKKYGGFDSPTVAYSVLVVAKVEKGKSKKLKSVKELLGITIMERSSFEKNPIDFLEAKGYKEVKKDLIIKLPKYSLFELENGRKRMLASAGELQKGNELALPSKYVNFLYLASHYEKLKGSPEDNEQKQLFVEQHKHYLDEIIEQISEFSKRVILADANLDKVLSAYNKHRDKPIREQAENIIHLFTLTNLGAPAAFKYFDTTIDRKRYTSTKEVLDATLIHQSITGLYETRIDLSQLGGD

SEQ ID NO: 1593 - protein, 1368 aa, artificial  sequence
  Synthetic Sequence
MDKKYSIGLDIGTNSVGWAVITDEYKVPSKKFKVLGNTDRHSIKKNLIGALLFDSGETAEATRLKRTARRRYTRRKNRICYLQEIFSNEMAKVDDSFFHRLEESFLVEEDKKHERHPIFGNIVDEVAYHEKYPTIYHLRKKLVDSTDKADLRLIYLALAHMIKFRGHFLIEGDLNPDNSDVDKLFIQLVQTYNQLFEENPINASGVDAKAILSARLSKSRRLENLIAQLPGEKKNGLFGNLIALSLGLTPNFKSNFDLAEDAKLQLSKDTYDDDLDNLLAQIGDQYADLFLAAKNLSDAILLSDILRVNTEITKAPLSASMIKRYDEHHQDLTLLKALVRQQLPEKYKEIFFDQSKNGYAGYIDGGASQEEFYKFIKPILEKMDGTEELLVKLNREDLLRKQRTFDNGSIPHQIHLGELHAILRRQEDFYPFLKDNREKIEKILTFRIPYYVGPLARGNSRFAWMTRKSEETITPWNFEEVVDKGASAQSFIERMTNFDKNLPNEKVLPKHSLLYEYFTVYNELTKVKYVTEGMRKPAFLSGEQKKAIVDLLFKTNRKVTVKQLKEDYFKKIECFDSVEISGVEDRFNASLGTYHDLLKIIKDKDFLDNEENEDILEDIVLTLTLFEDREMIEERLKTYAHLFDDKVMKQLKRRRYTGWGRLSRKLINGIRDKQSGKTILDFLKSDGFANRNFMQLIHDDSLTFKEDIQKAQVSGQGDSLHEHIANLAGSPAIKKGILQTVKVVDELVKVMGRHKPENIVIEMARENQTTQKGQKNSRERMKRIEEGIKELGSQILKEHPVENTQLQNEKLYLYYLQNGRDMYVDQELDINRLSDYDVDHIVPQSFLKDDSIDNKVLTRSDKNRGKSDNVPSEEVVKKMKNYWRQLLNAKLITQRKFDNLTKAERGGLSELDKAGFIKPPLVETRQITKHVAQILDSRMNTKYDENDKLIREVKVITLKSKLVSDFRKDFQFYKVREINNYHHAHDAYLNAVVGTALIKKYPKLESEFVYGDYKVYDVRKMIAKSEQEIGKATAKYFFYSNIMNFFKTEITLANGEIRKRPLIETNGETGEIVWDKGRDFATVRKVLSMPQVNIVKKTEVQTGGFSKESILPKRNSDKLIARKKDWDPKKYGGFDSPTVAYSVLVVAKVEKGKSKKLKSVKELLGITIMERSSFEKNPIDFLEAKGYKEVKKDLIIKLPKYSLFELENGRKRMLASAGELQKGNELALPSKYVNFLYLASHYEKLKGSPEDNEQKQLFVEQHKHYLDEIIEQISEFSKRVILADANLDKVLSAYNKHRDKPIREQAENIIHLFTLTNLGAPAAFKYFDTTIDRKRYTSTKEVLDATLIHQSITGLYETRIDLSQLGGD

SEQ ID NO: 1594 - protein, 1368 aa, artificial  sequence
  Synthetic Sequence
MDKKYSIGLDIGTNSVGWAVITDEYKVPSKKFKVLGNTDRHSIKKNLIGALLFDSGETAEATRLKRTARRRYTRRKNRICYLQEIFSNEMAKVDDSFFHRLEESFLVEEDKKHERHPIFGNIVDEVAYHEKYPTIYHLRKKLVDSTDKADLRLIYLALAHMIKFRGHFLIEGDLNPDNSDVDKLFIQLVQTYNQLFEENPINASGVDAKAILSARLSKSRRLENLIAQLPGEKKNGLFGNLIALSLGLTPNFKSNFDLAEDAKLQLSKDTYDDDLDNLLAQIGDQYADLFLAAKNLSDAILLSDILRVNTEITKAPLSASMIKRYDEHHQDLTLLKALVRQQLPEKYKEIFFDQSKNGYAGYIDGGASQEEFYKFIKPILEKMDGTEELLVKLNREDLLRKQRTFDNGSIPHQIHLGELHAILRRQEDFYPFLKDNREKIEKILTFRIPYYVGPLARGNSRFAWMTRKSEETITPWNFEEVVDKGASAQSFIERMTNFDKNLPNEKVLPKHSLLYEYFTVYNELTKVKYVTEGMRKPAFLSGEQKKAIVDLLFKTNRKVTVKQLKEDYFKKIECFDSVEISGVEDRFNASLGTYHDLLKIIKDKDFLDNEENEDILEDIVLTLTLFEDREMIEERLKTYAHLFDDKVMKQLKRRRYTGWGRLSRKLINGIRDKQSGKTILDFLKSDGFANRNFMQLIHDDSLTFKEDIQKAQVSGQGDSLHEHIANLAGSPAIKKGILQTVKVVDELVKVMGRHKPENIVIEMARENQTTQKGQKNSRERMKRIEEGIKELGSQILKEHPVENTQLQNEKLYLYYLQNGRDMYVDQELDINRLSDYDVDHIVPQSFLKDDSIDNKVLTRSDKNRGKSDNVPSEEVVKKMKNYWRQLLNAKLITQRKFDNLTKAERGGLSELDKAGFIKRQLVETRQPPKHVAQILDSRMNTKYDENDKLIREVKVITLKSKLVSDFRKDFQFYKVREINNYHHAHDAYLNAVVGTALIKKYPKLESEFVYGDYKVYDVRKMIAKSEQEIGKATAKYFFYSNIMNFFKTEITLANGEIRKRPLIETNGETGEIVWDKGRDFATVRKVLSMPQVNIVKKTEVQTGGFSKESILPKRNSDKLIARKKDWDPKKYGGFDSPTVAYSVLVVAKVEKGKSKKLKSVKELLGITIMERSSFEKNPIDFLEAKGYKEVKKDLIIKLPKYSLFELENGRKRMLASAGELQKGNELALPSKYVNFLYLASHYEKLKGSPEDNEQKQLFVEQHKHYLDEIIEQISEFSKRVILADANLDKVLSAYNKHRDKPIREQAENIIHLFTLTNLGAPAAFKYFDTTIDRKRYTSTKEVLDATLIHQSITGLYETRIDLSQLGGD

SEQ ID NO: 1595 - protein, 1214 aa, artificial  sequence
  Synthetic Sequence
MDKKYSIGLDIGTNSVGWAVITDEYKVPSKKFKVLGNTDRHSIKKNLIGALLFDSGETAEATRLKRTARRRYTRRKNRICYLQEIFSNEMAKVDDSFFHRLEESFLVEEDKKHERHPIFGNIVDEVAYHEKYPTIYHLRKKLVDSTDKADLRLIYLALAHMIKFRGHFLIEGDLNPDNSDVDKLFIQLVQTYNQLFEENPINASGVDAKAILSARLSKSRRLENLIAQLPGEKKNGLFGNLIALSLGLTPNFKSNFDLAEDAKLQLSKDTYDDDLDNLLAQIGDQYADLFLAAKNLSDAILLSDILRVNTEITKAPLSASMIKRYDEHHQDLTLLKALVRQQLPEKYKEIFFDQSKNGYAGYIDGGASQEEFYKFIKPILEKMDGTEELLVKLNREDLLRKQRTFDNGSIPHQIHLGELHAILRRQEDFYPFLKDNREKIEKILTFRIPYYVGPLARGNSRFAWMTRKSEETITPWNFEEVVDKGASAQSFIERMTNFDKNLPNEKVLPKHSLLYEYFTVYNELTKVKYVTEGMRKPAFLSGEQKKAIVDLLFKTNRKVTVKQLKEDYFKKIECFDSVEISGVEDRFNASLGTYHDLLKIIKDKDFLDNEENEDILEDIVLTLTLFEDREMIEERLKTYAHLFDDKVMKQLKRRRYTGWGRLSRKLINGIRDKQSGKTILDFLKSDGFANRNFMQLIHDDSLTFKEDIQKAQVSGQGDSLHEHIANLAGSPAIKKGILQTVKVVDELVKVMGRHKPENIVIEMARENQETRQITKHVAQILDSRMNTKYDENDKLIREVKVITLKSKLVSDFRKDFQFYKVREINNYHHAHDAYLNAVVGTALIKKYPKLESEFVYGDYKVYDVRKMIAKSEQEIGKATAKYFFYSNIMNFFKTEITLANGEIRKRPLIETNGETGEIVWDKGRDFATVRKVLSMPQVNIVKKTEVQTGGFSKESILPKRNSDKLIARKKDWDPKKYGGFDSPTVAYSVLVVAKVEKGKSKKLKSVKELLGITIMERSSFEKNPIDFLEAKGYKEVKKDLIIKLPKYSLFELENGRKRMLASAGELQKGNELALPSKYVNFLYLASHYEKLKGSPEDNEQKQLFVEQHKHYLDEIIEQISEFSKRVILADANLDKVLSAYNKHRDKPIREQAENIIHLFTLTNLGAPAAFKYFDTTIDRKRYTSTKEVLDATLIHQSITGLYETRIDLSQLGGD

SEQ ID NO: 1596 - protein, 1220 aa, artificial  sequence
  Synthetic Sequence
MDKKYSIGLDIGTNSVGWAVITDEYKVPSKKFKVLGNTDRHSIKKNLIGALLFDSGETAEATRLKRTARRRYTRRKNRICYLQEIFSNEMAKVDDSFFHRLEESFLVEEDKKHERHPIFGNIVDEVAYHEKYPTIYHLRKKLVDSTDKADLRLIYLALAHMIKFRGHFLIEGDLNPDNSDVDKLFIQLVQTYNQLFEENPINASGVDAKAILSARLSKSRRLENLIAQLPGEKKNGLFGNLIALSLGLTPNFKSNFDLAEDAKLQLSKDTYDDDLDNLLAQIGDQYADLFLAAKNLSDAILLSDILRVNTEITKAPLSASMIKRYDEHHQDLTLLKALVRQQLPEKYKEIFFDQSKNGYAGYIDGGASQEEFYKFIKPILEKMDGTEELLVKLNREDLLRKQRTFDNGSIPHQIHLGELHAILRRQEDFYPFLKDNREKIEKILTFRIPYYVGPLARGNSRFAWMTRKSEETITPWNFEEVVDKGASAQSFIERMTNFDKNLPNEKVLPKHSLLYEYFTVYNELTKVKYVTEGMRKPAFLSGEQKKAIVDLLFKTNRKVTVKQLKEDYFKKIECFDSVEISGVEDRFNASLGTYHDLLKIIKDKDFLDNEENEDILEDIVLTLTLFEDREMIEERLKTYAHLFDDKVMKQLKRRRYTGWGRLSRKLINGIRDKQSGKTILDFLKSDGFANRNFMQLIHDDSLTFKEDIQKAQVSGQGDSLHEHIANLAGSPAIKKGILQTVKVVDELVKVMGRHKPENIVIEMARENQGGSGGSETRQITKHVAQILDSRMNTKYDENDKLIREVKVITLKSKLVSDFRKDFQFYKVREINNYHHAHDAYLNAVVGTALIKKYPKLESEFVYGDYKVYDVRKMIAKSEQEIGKATAKYFFYSNIMNFFKTEITLANGEIRKRPLIETNGETGEIVWDKGRDFATVRKVLSMPQVNIVKKTEVQTGGFSKESILPKRNSDKLIARKKDWDPKKYGGFDSPTVAYSVLVVAKVEKGKSKKLKSVKELLGITIMERSSFEKNPIDFLEAKGYKEVKKDLIIKLPKYSLFELENGRKRMLASAGELQKGNELALPSKYVNFLYLASHYEKLKGSPEDNEQKQLFVEQHKHYLDEIIEQISEFSKRVILADANLDKVLSAYNKHRDKPIREQAENIIHLFTLTNLGAPAAFKYFDTTIDRKRYTSTKEVLDATLIHQSITGLYETRIDLSQLGGD

SEQ ID NO: 1597 - protein, 1218 aa, artificial  sequence
  Synthetic Sequence
MDKKYSIGLDIGTNSVGWAVITDEYKVPSKKFKVLGNTDRHSIKKNLIGALLFDSGETAEATRLKRTARRRYTRRKNRICYLQEIFSNEMAKVDDSFFHRLEESFLVEEDKKHERHPIFGNIVDEVAYHEKYPTIYHLRKKLVDSTDKADLRLIYLALAHMIKFRGHFLIEGDLNPDNSDVDKLFIQLVQTYNQLFEENPINASGVDAKAILSARLSKSRRLENLIAQLPGEKKNGLFGNLIALSLGLTPNFKSNFDLAEDAKLQLSKDTYDDDLDNLLAQIGDQYADLFLAAKNLSDAILLSDILRVNTEITKAPLSASMIKRYDEHHQDLTLLKALVRQQLPEKYKEIFFDQSKNGYAGYIDGGASQEEFYKFIKPILEKMDGTEELLVKLNREDLLRKQRTFDNGSIPHQIHLGELHAILRRQEDFYPFLKDNREKIEKILTFRIPYYVGPLARGNSRFAWMTRKSEETITPWNFEEVVDKGASAQSFIERMTNFDKNLPNEKVLPKHSLLYEYFTVYNELTKVKYVTEGMRKPAFLSGEQKKAIVDLLFKTNRKVTVKQLKEDYFKKIECFDSVEISGVEDRFNASLGTYHDLLKIIKDKDFLDNEENEDILEDIVLTLTLFEDREMIEERLKTYAHLFDDKVMKQLKRRRYTGWGRLSRKLINGIRDKQSGKTILDFLKSDGFANRNFMQLIHDDSLTFKEDIQKAQVSGQGDSLHEHIANLAGSPAIKKGILQTVKVVDELVKVMGRHKPENIVIEMARENQRQLVETRQITKHVAQILDSRMNTKYDENDKLIREVKVITLKSKLVSDFRKDFQFYKVREINNYHHAHDAYLNAVVGTALIKKYPKLESEFVYGDYKVYDVRKMIAKSEQEIGKATAKYFFYSNIMNFFKTEITLANGEIRKRPLIETNGETGEIVWDKGRDFATVRKVLSMPQVNIVKKTEVQTGGFSKESILPKRNSDKLIARKKDWDPKKYGGFDSPTVAYSVLVVAKVEKGKSKKLKSVKELLGITIMERSSFEKNPIDFLEAKGYKEVKKDLIIKLPKYSLFELENGRKRMLASAGELQKGNELALPSKYVNFLYLASHYEKLKGSPEDNEQKQLFVEQHKHYLDEIIEQISEFSKRVILADANLDKVLSAYNKHRDKPIREQAENIIHLFTLTNLGAPAAFKYFDTTIDRKRYTSTKEVLDATLIHQSITGLYETRIDLSQLGGD

SEQ ID NO: 1598 - protein, 1224 aa, artificial  sequence
  Synthetic Sequence
MDKKYSIGLDIGTNSVGWAVITDEYKVPSKKFKVLGNTDRHSIKKNLIGALLFDSGETAEATRLKRTARRRYTRRKNRICYLQEIFSNEMAKVDDSFFHRLEESFLVEEDKKHERHPIFGNIVDEVAYHEKYPTIYHLRKKLVDSTDKADLRLIYLALAHMIKFRGHFLIEGDLNPDNSDVDKLFIQLVQTYNQLFEENPINASGVDAKAILSARLSKSRRLENLIAQLPGEKKNGLFGNLIALSLGLTPNFKSNFDLAEDAKLQLSKDTYDDDLDNLLAQIGDQYADLFLAAKNLSDAILLSDILRVNTEITKAPLSASMIKRYDEHHQDLTLLKALVRQQLPEKYKEIFFDQSKNGYAGYIDGGASQEEFYKFIKPILEKMDGTEELLVKLNREDLLRKQRTFDNGSIPHQIHLGELHAILRRQEDFYPFLKDNREKIEKILTFRIPYYVGPLARGNSRFAWMTRKSEETITPWNFEEVVDKGASAQSFIERMTNFDKNLPNEKVLPKHSLLYEYFTVYNELTKVKYVTEGMRKPAFLSGEQKKAIVDLLFKTNRKVTVKQLKEDYFKKIECFDSVEISGVEDRFNASLGTYHDLLKIIKDKDFLDNEENEDILEDIVLTLTLFEDREMIEERLKTYAHLFDDKVMKQLKRRRYTGWGRLSRKLINGIRDKQSGKTILDFLKSDGFANRNFMQLIHDDSLTFKEDIQKAQVSGQGDSLHEHIANLAGSPAIKKGILQTVKVVDELVKVMGRHKPENIVIEMARENQGGSGGSRQLVETRQITKHVAQILDSRMNTKYDENDKLIREVKVITLKSKLVSDFRKDFQFYKVREINNYHHAHDAYLNAVVGTALIKKYPKLESEFVYGDYKVYDVRKMIAKSEQEIGKATAKYFFYSNIMNFFKTEITLANGEIRKRPLIETNGETGEIVWDKGRDFATVRKVLSMPQVNIVKKTEVQTGGFSKESILPKRNSDKLIARKKDWDPKKYGGFDSPTVAYSVLVVAKVEKGKSKKLKSVKELLGITIMERSSFEKNPIDFLEAKGYKEVKKDLIIKLPKYSLFELENGRKRMLASAGELQKGNELALPSKYVNFLYLASHYEKLKGSPEDNEQKQLFVEQHKHYLDEIIEQISEFSKRVILADANLDKVLSAYNKHRDKPIREQAENIIHLFTLTNLGAPAAFKYFDTTIDRKRYTSTKEVLDATLIHQSITGLYETRIDLSQLGGD

SEQ ID NO: 1599 - protein, 1221 aa, artificial  sequence
  Synthetic Sequence
MDKKYSIGLDIGTNSVGWAVITDEYKVPSKKFKVLGNTDRHSIKKNLIGALLFDSGETAEATRLKRTARRRYTRRKNRICYLQEIFSNEMAKVDDSFFHRLEESFLVEEDKKHERHPIFGNIVDEVAYHEKYPTIYHLRKKLVDSTDKADLRLIYLALAHMIKFRGHFLIEGDLNPDNSDVDKLFIQLVQTYNQLFEENPINASGVDAKAILSARLSKSRRLENLIAQLPGEKKNGLFGNLIALSLGLTPNFKSNFDLAEDAKLQLSKDTYDDDLDNLLAQIGDQYADLFLAAKNLSDAILLSDILRVNTEITKAPLSASMIKRYDEHHQDLTLLKALVRQQLPEKYKEIFFDQSKNGYAGYIDGGASQEEFYKFIKPILEKMDGTEELLVKLNREDLLRKQRTFDNGSIPHQIHLGELHAILRRQEDFYPFLKDNREKIEKILTFRIPYYVGPLARGNSRFAWMTRKSEETITPWNFEEVVDKGASAQSFIERMTNFDKNLPNEKVLPKHSLLYEYFTVYNELTKVKYVTEGMRKPAFLSGEQKKAIVDLLFKTNRKVTVKQLKEDYFKKIECFDSVEISGVEDRFNASLGTYHDLLKIIKDKDFLDNEENEDILEDIVLTLTLFEDREMIEERLKTYAHLFDDKVMKQLKRRRYTGWGRLSRKLINGIRDKQSGKTILDFLKSDGFANRNFMQLIHDDSLTFKEDIQKAQVSGQGDSLHEHIANLAGSPAIKKGILQTVKVVDELVKVMGRHKPENIVIEMARENQGGSRQLVETRQITKHVAQILDSRMNTKYDENDKLIREVKVITLKSKLVSDFRKDFQFYKVREINNYHHAHDAYLNAVVGTALIKKYPKLESEFVYGDYKVYDVRKMIAKSEQEIGKATAKYFFYSNIMNFFKTEITLANGEIRKRPLIETNGETGEIVWDKGRDFATVRKVLSMPQVNIVKKTEVQTGGFSKESILPKRNSDKLIARKKDWDPKKYGGFDSPTVAYSVLVVAKVEKGKSKKLKSVKELLGITIMERSSFEKNPIDFLEAKGYKEVKKDLIIKLPKYSLFELENGRKRMLASAGELQKGNELALPSKYVNFLYLASHYEKLKGSPEDNEQKQLFVEQHKHYLDEIIEQISEFSKRVILADANLDKVLSAYNKHRDKPIREQAENIIHLFTLTNLGAPAAFKYFDTTIDRKRYTSTKEVLDATLIHQSITGLYETRIDLSQLGGD

SEQ ID NO: 1600 - protein, 23 aa, artificial  sequence
  Synthetic Sequence
GFIKRQLVETRQITKHVAQILDS

SEQ ID NO: 1601 - protein, 22 aa, artificial  sequence
  Synthetic Sequence
GFIKRQLVETRQITKHVAQILD

SEQ ID NO: 1602 - protein, 14 aa, artificial  sequence
  Synthetic Sequence
GFIKRQLVETRQIT

SEQ ID NO: 1603 - protein, 13 aa, artificial  sequence
  Synthetic Sequence
GFIKRQLVETRQI

SEQ ID NO: 1604 - protein, 11 aa, artificial  sequence
  Synthetic Sequence
GFIKRQLVETR

SEQ ID NO: 1605 - protein, 22 aa, artificial  sequence
  Synthetic Sequence
FIKRQLVETRQITKHVAQILDS

SEQ ID NO: 1606 - protein, 21 aa, artificial  sequence
  Synthetic Sequence
FIKRQLVETRQITKHVAQILD

SEQ ID NO: 1607 - protein, 13 aa, artificial  sequence
  Synthetic Sequence
FIKRQLVETRQIT

SEQ ID NO: 1608 - protein, 12 aa, artificial  sequence
  Synthetic Sequence
FIKRQLVETRQI

SEQ ID NO: 1609 - protein, 10 aa, artificial  sequence
  Synthetic Sequence
FIKRQLVETR

SEQ ID NO: 1610 - protein, 21 aa, artificial  sequence
  Synthetic Sequence
IKRQLVETRQITKHVAQILDS

SEQ ID NO: 1611 - protein, 20 aa, artificial  sequence
  Synthetic Sequence
IKRQLVETRQITKHVAQILD

SEQ ID NO: 1612 - protein, 12 aa, artificial  sequence
  Synthetic Sequence
IKRQLVETRQIT

SEQ ID NO: 1613 - protein, 11 aa, artificial  sequence
  Synthetic Sequence
IKRQLVETRQI

SEQ ID NO: 1614 - protein, 9 aa, artificial  sequence
  Synthetic Sequence
IKRQLVETR

SEQ ID NO: 1615 - protein, 19 aa, artificial  sequence
  Synthetic Sequence
RQLVETRQITKHVAQILDS

SEQ ID NO: 1616 - protein, 18 aa, artificial  sequence
  Synthetic Sequence
RQLVETRQITKHVAQILD

SEQ ID NO: 1617 - protein, 10 aa, artificial  sequence
  Synthetic Sequence
RQLVETRQIT

SEQ ID NO: 1618 - protein, 9 aa, artificial  sequence
  Synthetic Sequence
RQLVETRQI

SEQ ID NO: 1619 - protein, 7 aa, artificial  sequence
  Synthetic Sequence
RQLVETR

SEQ ID NO: 1620 - protein, 6 aa, artificial  sequence
  Synthetic Sequence
GGSGGS

SEQ ID NO: 1621 - protein, 845 aa, artificial  sequence
  Synthetic Sequence
MDYKDHDGDYKDHDIDYKDDDDKMAPKKKRKVGIHGVPAASIAATLENDLARLENENARLEKDIANLERDLAKLEREEAYFGGSGGSGGSASGQGDSLHEHIANLAGSPAIKKGILQTVKVVDELVKVMGRHKPENIVIEMARENQTTQKGQKNSRERMKRIEEGIKELGSQILKEHPVENTQLQNEKLYLYYLQNGRDMYVDQELDINRLSDYDVDHIVPQSFLKDDSIDNKVLTRSDKNRGKSDNVPSEEVVKKMKNYWRQLLNAKLITQRKFDNLTKAERGGLSELDKAGFIKRQLVETRQITKHVAQILDSRMNTKYDENDKLIREVKVITLKSKLVSDFRKDFQFYKVREINNYHHAHDAYLNAVVGTALIKKYPKLESEFVYGDYKVYDVRKMIAKSEQEIGKATAKYFFYSNIMNFFKTEITLANGEIRKRPLIETNGETGEIVWDKGRDFATVRKVLSMPQVNIVKKTEVQTGGFSKESILPKRNSDKLIARKKDWDPKKYGGFDSPTVAYSVLVVAKVEKGKSKKLKSVKELLGITIMERSSFEKNPIDFLEAKGYKEVKKDLIIKLPKYSLFELENGRKRMLASAGELQKGNELALPSKYVNFLYLASHYEKLKGSPEDNEQKQLFVEQHKHYLDEIIEQISEFSKRVILADANLDKVLSAYNKHRDKPIREQAENIIHLFTLTNLGAPAAFKYFDTTIDRKRYTSTKEVLDATLIHQSITGLYETRIDLSQLGGDGSGGSGGSGGSGGSGGSGGSGGSGGVDDKKYSIGLDIGTNSVGWAVITDEYKVPSKKFKVLGNTDRHSIKKNLIGALLFDSGEKRPAATKKAGQAKKKK

SEQ ID NO: 1622 - protein, 837 aa, artificial  sequence
  Synthetic Sequence
MDYKDHDGDYKDHDIDYKDDDDKMAPKKKRKVGIHGVPAASIAATLENDLARLENENARLEKDIANLERDLAKLEREEAYFGGSGGSGGSASGQGDNVPSEEVVKKMKNYWRQLLNAKLITQRKFDNLTKAERGGLSELDKAGFIKRQLVETRQITKHVAQILDSRMNTKYDENDKLIREVKVITLKSKLVSDFRKDFQFYKVREINNYHHAHDAYLNAVVGTALIKKYPKLESEFVYGDYKVYDVRKMIAKSEQEIGKATAKYFFYSNIMNFFKTEITLANGEIRKRPLIETNGETGEIVWDKGRDFATVRKVLSMPQVNIVKKTEVQTGGFSKESILPKRNSDKLIARKKDWDPKKYGGFDSPTVAYSVLVVAKVEKGKSKKLKSVKELLGITIMERSSFEKNPIDFLEAKGYKEVKKDLIIKLPKYSLFELENGRKRMLASAGELQKGNELALPSKYVNFLYLASHYEKLKGSPEDNEQKQLFVEQHKHYLDEIIEQISEFSKRVILADANLDKVLSAYNKHRDKPIREQAENIIHLFTLTNLGAPAAFKYFDTTIDRKRYTSTKEVLDATLIHQSITGLYETRIDLSQLGGDGSGGSGGSGGSGGSGGSGGSGGSGGVDDKKYSIGLDIGTNSVGWAVITDEYKVPSKKFKVLGNTDRHSIKKNLIGALLFDSGGSSGSPAIKKGILQTVKVVDELVKVMGRHKPENIVIEMARENQTTQKGQKNSRERMKRIEEGIKELGSQILKEHPVENTQLQNEKLYLYYLQNGRDMYVDQELDINRLSDYDVDHIVPQSFLKDDSIDNKVLTRSDKNRGKSEKRPAATKKAGQAKKKK

SEQ ID NO: 1623 - protein, 1368 aa, artificial  sequence
  Synthetic Sequence
MDKKYSIGLDIGTNSVGWAVITDEYKVPSKKFKVLGNTDRHSIKKNLIGALLFDSGETAEATRLKRTARRRYTRRKNRISYLQEIFSNEMAKVDDSFFHRLEESFLVEEDKKHERHPIFGNIVDEVAYHEKYPTIYHLRKKLVDSTDKADLRLIYLALAHMIKFRGHFLIEGDLNPDNSDVDKLFIQLVQTYNQLFEENPINASGVDAKAILSARLSKSRRLENLIAQLPGEKKNGLFGNLIALSLGLTPNFKSNFDLAEDAKLQLSKDTYDDDLDNLLAQIGDQYADLFLAAKNLSDAILLSDILRVNTEITKAPLSASMIKRYDEHHQDLTLLKALVRQQLPEKYKEIFFDQCKNGYAGYIDGGASQEEFYKFIKPILEKMDGTEELLVKLNREDLLRKQRTFDNGSIPHQIHLGELHAILRRQEDFYPFLKDNREKIEKILTFRIPYYVGPLARGNSRFAWMTRKSEETITPWNFEEVVDKGASAQSFIERMTNFDKNLPNEKVLPKHSLLYEYFTVYNELTKVKYVTEGMRKPAFLSGEQKKAIVDLLFKTNRKVTVKQLKEDYFKKIESFDSVEISGVEDRFNASLGTYHDLLKIIKDKDFLDNEENEDILEDIVLTLTLFEDREMIEERLKTYAHLFDDKVMKQLKRRRYTGWGRLSRKLINGIRDKQSGKTILDFLKSDGFANRNFMQLIHDDSLTFKEDIQKAQVSGQGDSLHEHIANLAGSPAIKKGILQTVKVVDELVKVMGRHKPENIVIEMARENQTTQKGQKNSRERMKRIEEGIKELGSQILKEHPVENTQLQNEKLYLYYLQNGRDMYVDQELDINRLSDYDVDHIVPQSFLKDDSIDNKVLTRSDKNRGKCDNVPSEEVVKKMKNYWRQLLNAKLITQRKFDNLTKAERGGLSELDKAGFIKRQLVETRQITKHVAQILDSRMNTKYDENDKLIREVKVITLKSKLVSDFRKDFQFYKVREINNYHHAHDAYLNAVVGTALIKKYPKLESEFVYGDYKVYDVRKMIAKSEQEIGKATAKYFFYSNIMNFFKTEITLANGEIRKRPLIETNGETGEIVWDKGRDFATVRKVLSMPQVNIVKKTEVQTGGFSKESILPKRNSDKLIARKKDWDPKKYGGFDSPTVAYSVLVVAKVEKGKSKKLKSVKELLGITIMERSSFEKNPIDFLEAKGYKEVKKDLIIKLPKYSLFELENGRKRMLASAGELQKGNELALPSKYVNFLYLASHYEKLKGSPEDNEQKQLFVEQHKHYLDEIIEQISEFSKRVILADANLDKVLSAYNKHRDKPIREQAENIIHLFTLTNLGAPAAFKYFDTTIDRKRYTSTKEVLDATLIHQSITGLYETRIDLSQLGGD

SEQ ID NO: 1624 - protein, 1368 aa, artificial  sequence
  Synthetic Sequence
MDKKYSIGLAIGTNSVGWAVITDEYKVPSKKFKVLGNTDRHSIKKNLIGALLFDSGETAEATRLKRTARRRYTRRKNRISYLQEIFSNEMAKVDDSFFHRLEESFLVEEDKKHERHPIFGNIVDEVAYHEKYPTIYHLRKKLVDSTDKADLRLIYLALAHMIKFRGHFLIEGDLNPDNSDVDKLFIQLVQTYNQLFEENPINASGVDAKAILSARLSKSRRLENLIAQLPGEKKNGLFGNLIALSLGLTPNFKSNFDLAEDAKLQLSKDTYDDDLDNLLAQIGDQYADLFLAAKNLSDAILLSDILRVNTEITKAPLSASMIKRYDEHHQDLTLLKALVRQQLPEKYKEIFFDQCKNGYAGYIDGGASQEEFYKFIKPILEKMDGTEELLVKLNREDLLRKQRTFDNGSIPHQIHLGELHAILRRQEDFYPFLKDNREKIEKILTFRIPYYVGPLARGNSRFAWMTRKSEETITPWNFEEVVDKGASAQSFIERMTNFDKNLPNEKVLPKHSLLYEYFTVYNELTKVKYVTEGMRKPAFLSGEQKKAIVDLLFKTNRKVTVKQLKEDYFKKIESFDSVEISGVEDRFNASLGTYHDLLKIIKDKDFLDNEENEDILEDIVLTLTLFEDREMIEERLKTYAHLFDDKVMKQLKRRRYTGWGRLSRKLINGIRDKQSGKTILDFLKSDGFANRNFMQLIHDDSLTFKEDIQKAQVSGQGDSLHEHIANLAGSPAIKKGILQTVKVVDELVKVMGRHKPENIVIEMARENQTTQKGQKNSRERMKRIEEGIKELGSQILKEHPVENTQLQNEKLYLYYLQNGRDMYVDQELDINRLSDYDVDAIVPQSFLKDDSIDNKVLTRSDKNRGKCDNVPSEEVVKKMKNYWRQLLNAKLITQRKFDNLTKAERGGLSELDKAGFIKRQLVETRQITKHVAQILDSRMNTKYDENDKLIREVKVITLKSKLVSDFRKDFQFYKVREINNYHHAHDAYLNAVVGTALIKKYPKLESEFVYGDYKVYDVRKMIAKSEQEIGKATAKYFFYSNIMNFFKTEITLANGEIRKRPLIETNGETGEIVWDKGRDFATVRKVLSMPQVNIVKKTEVQTGGFSKESILPKRNSDKLIARKKDWDPKKYGGFDSPTVAYSVLVVAKVEKGKSKKLKSVKELLGITIMERSSFEKNPIDFLEAKGYKEVKKDLIIKLPKYSLFELENGRKRMLASAGELQKGNELALPSKYVNFLYLASHYEKLKGSPEDNEQKQLFVEQHKHYLDEIIEQISEFSKRVILADANLDKVLSAYNKHRDKPIREQAENIIHLFTLTNLGAPAAFKYFDTTIDRKRYTSTKEVLDATLIHQSITGLYETRIDLSQLGGD

SEQ ID NO: 1625 - protein, 1368 aa, artificial  sequence
  Synthetic Sequence
MDKKYSIGLDIGTNSVGWAVITDEYKVPSKKFKVLGNTDRHSIKKNLIGALLFDSGETAEATRLKRTARRRYTRRKNRISYLQEIFSNEMAKVDDSFFHRLEESFLVEEDKKHERHPIFGNIVDEVAYHEKYPTIYHLRKKLVDSTDKADLRLIYLALAHMIKFRGHFLIEGDLNPDNSDVDKLFIQLVQTYNQLFEENPINASGVDAKAILSARLSKSRRLENLIAQLPGEKKNGLFGNLIALSLGLTPNFKSNFDLAEDAKLQLSKDTYDDDLDNLLAQIGDQYADLFLAAKNLSDAILLSDILRVNTEITKAPLSASMIKRYDEHHQDLTLLKALVRQQLPEKYKEIFFDQSKNGYAGYIDGGASQEEFYKFIKPILEKMDGTEELLVKLNREDLLRKQRTFDNGSIPHQIHLGELHAILRRQEDFYPFLKDNREKIEKILTFRIPYYVGPLARGNSRFAWMTRKSEETITPWNFEEVVDKGASAQSFIERMTNFDKNLPNEKVLPKHSLLYEYFTVYNELTKVKYVTEGMRKPAFLSGEQKKAIVDLLFKTNRKVTVKQLKEDYFKKIESFDSVEISGVEDRFNASLGTYHDLLKIIKDKDFLDNEENEDILEDIVLTLTLFEDREMIEERLKTYAHLFDDKVMKQLKRRRYTGWGRLSRKLINGIRDKQSGKTILDFLKSDGFANRNFMQLIHDDSLTFKEDIQKAQVSGQGDSLHEHIANLAGSPAIKKGILQTVKVVDELVKVMGRHKPENIVIEMARENQTTQKGQKNSRERMKRIEEGIKELGSQILKEHPVENTQLQNEKLYLYYLQNGRDMYVDQELDINRLSDYDVDHIVPQSFLKDDSIDNKVLTRSDKNRGKCDNVPSEEVVKKMKNYWRQLLNAKLITQRKFDNLTKAERGGLSELDKAGFIKRQLVETRQITKHVAQILDSRMNTKYDENDKLIREVKVITLKSKLVSDFRKDFQFYKVREINNYHHAHDAYLNAVVGTALIKKYPKLESEFVYGDYKVYDVRKMIAKSEQEIGKATAKYFFYSNIMNFFKTEITLACGEIRKRPLIETNGETGEIVWDKGRDFATVRKVLSMPQVNIVKKTEVQTGGFSKESILPKRNSDKLIARKKDWDPKKYGGFDSPTVAYSVLVVAKVEKGKSKKLKSVKELLGITIMERSSFEKNPIDFLEAKGYKEVKKDLIIKLPKYSLFELENGRKRMLASAGELQKGNELALPSKYVNFLYLASHYEKLKGSPEDNEQKQLFVEQHKHYLDEIIEQISEFSKRVILADANLDKVLSAYNKHRDKPIREQAENIIHLFTLTNLGAPAAFKYFDTTIDRKRYTSTKEVLDATLIHQSITGLYETRIDLSQLGGD

SEQ ID NO: 1626 - protein, 1368 aa, artificial  sequence
  Synthetic Sequence
MDKKYSIGLAIGTNSVGWAVITDEYKVPSKKFKVLGNTDRHSIKKNLIGALLFDSGETAEATRLKRTARRRYTRRKNRISYLQEIFSNEMAKVDDSFFHRLEESFLVEEDKKHERHPIFGNIVDEVAYHEKYPTIYHLRKKLVDSTDKADLRLIYLALAHMIKFRGHFLIEGDLNPDNSDVDKLFIQLVQTYNQLFEENPINASGVDAKAILSARLSKSRRLENLIAQLPGEKKNGLFGNLIALSLGLTPNFKSNFDLAEDAKLQLSKDTYDDDLDNLLAQIGDQYADLFLAAKNLSDAILLSDILRVNTEITKAPLSASMIKRYDEHHQDLTLLKALVRQQLPEKYKEIFFDQSKNGYAGYIDGGASQEEFYKFIKPILEKMDGTEELLVKLNREDLLRKQRTFDNGSIPHQIHLGELHAILRRQEDFYPFLKDNREKIEKILTFRIPYYVGPLARGNSRFAWMTRKSEETITPWNFEEVVDKGASAQSFIERMTNFDKNLPNEKVLPKHSLLYEYFTVYNELTKVKYVTEGMRKPAFLSGEQKKAIVDLLFKTNRKVTVKQLKEDYFKKIESFDSVEISGVEDRFNASLGTYHDLLKIIKDKDFLDNEENEDILEDIVLTLTLFEDREMIEERLKTYAHLFDDKVMKQLKRRRYTGWGRLSRKLINGIRDKQSGKTILDFLKSDGFANRNFMQLIHDDSLTFKEDIQKAQVSGQGDSLHEHIANLAGSPAIKKGILQTVKVVDELVKVMGRHKPENIVIEMARENQTTQKGQKNSRERMKRIEEGIKELGSQILKEHPVENTQLQNEKLYLYYLQNGRDMYVDQELDINRLSDYDVDAIVPQSFLKDDSIDNKVLTRSDKNRGKCDNVPSEEVVKKMKNYWRQLLNAKLITQRKFDNLTKAERGGLSELDKAGFIKRQLVETRQITKHVAQILDSRMNTKYDENDKLIREVKVITLKSKLVSDFRKDFQFYKVREINNYHHAHDAYLNAVVGTALIKKYPKLESEFVYGDYKVYDVRKMIAKSEQEIGKATAKYFFYSNIMNFFKTEITLACGEIRKRPLIETNGETGEIVWDKGRDFATVRKVLSMPQVNIVKKTEVQTGGFSKESILPKRNSDKLIARKKDWDPKKYGGFDSPTVAYSVLVVAKVEKGKSKKLKSVKELLGITIMERSSFEKNPIDFLEAKGYKEVKKDLIIKLPKYSLFELENGRKRMLASAGELQKGNELALPSKYVNFLYLASHYEKLKGSPEDNEQKQLFVEQHKHYLDEIIEQISEFSKRVILADANLDKVLSAYNKHRDKPIREQAENIIHLFTLTNLGAPAAFKYFDTTIDRKRYTSTKEVLDATLIHQSITGLYETRIDLSQLGGD

SEQ ID NO: 1627 - protein, 1368 aa, Artificial Sequence
  Synthetic Sequence
MDKKYSIGLDIGTNSVGWAVITDEYKVPSKKFKVLGNTDRHSIKKNLIGALLFDSGETACATRLKRTARRRYTRRKNRISYLQEIFSNEMAKVDDSFFHRLEESFLVEEDKKHERHPIFGNIVDEVAYHEKYPTIYHLRKKLVDSTDKADLRLIYLALAHMIKFRGHFLIEGDLNPDNSDVDKLFIQLVQTYNQLFEENPINASGVDAKAILSARLSKSRRLENLIAQLPGEKKNGLFGNLIALSLGLTPNFKSNFDLAEDAKLQLSKDTYDCDLDNLLAQIGDQYADLFLAAKNLSDAILLSDILRVNTEITKAPLSASMIKRYDEHHQDLTLLKALVRQQLPEKYKEIFFDQSKNGYAGYIDGGASQEEFYKFIKPILEKMDGTEELLVKLNREDLLRKQRTFDNGSIPHQIHLGELHAILRRQEDFYPFLKDNREKIEKILTFRIPYYVGPLARGNSRFAWMTRKSEETITPWNFEEVVDKGASAQSFIERMTNFDKNLPNEKVLPKHSLLYEYFTVYNELTKVKYVTEGMRKPAFLSGEQKKAIVDLLFKTNRKVTVKQLKEDYFKKIESFDSVEISGVEDRFNASLGTYHDLLKIIKDKDFLDNEENEDILEDIVLTLTLFEDREMIEERLKTYAHLFDDKVMKQLKRRRYTGWGRLSRKLINGIRDKQSGKTILDFLKSDGFANRNFMQLIHDDSLTFKEDIQKAQVSGQGDSLHEHIANLAGSPAIKKGILQTVKVVDELVKVMGRHKPENIVIEMARENQTTQKGQKNSRERMKRIEEGIKELGSQILKEHPVENTQLQNEKLYLYYLQNGRDMYVDQELDINRLSDYDVDHIVPQSFLKDDSIDNKVLTRSDKNRGKSDNVPSEEVVKKMKNYWRQLLNAKLITQRKFDNLTKAERGGLSELDKAGFIKRQLVETRQITKHVAQILDSRMNTKYDENDKLIREVKVITLKSKLVSDFRKDFQFYKVREINNYHHAHDAYLNAVVGTALIKKYPKLESEFVYGDYKVYDVRKMIAKSEQEIGKATAKYFFYSNIMNFFKTEITLANGEIRKRPLIETNGETGEIVWDKGRDFATVRKVLSMPQVNIVKKTEVQTGGFSKESILPKRNSDKLIARKKDWDPKKYGGFDSPTVAYSVLVVAKVEKGKSKKLKSVKELLGITIMERSSFEKNPIDFLEAKGYKEVKKDLIIKLPKYSLFELENGRKRMLASAGELQKGNELALPSKYVNFLYLASHYEKLKGSPEDNEQKQLFVEQHKHYLDEIIEQISEFSKRVILADANLDKVLSAYNKHRDKPIREQAENIIHLFTLTNLGAPAAFKYFDTTIDRKRYTSTKEVLDATLIHQSITGLYETRIDLSQLGGD

SEQ ID NO: 1628 - protein, 1368 aa, Artificial Sequence
  Synthetic Sequence
MDKKYSIGLAIGTNSVGWAVITDEYKVPSKKFKVLGNTDRHSIKKNLIGALLFDSGETACATRLKRTARRRYTRRKNRISYLQEIFSNEMAKVDDSFFHRLEESFLVEEDKKHERHPIFGNIVDEVAYHEKYPTIYHLRKKLVDSTDKADLRLIYLALAHMIKFRGHFLIEGDLNPDNSDVDKLFIQLVQTYNQLFEENPINASGVDAKAILSARLSKSRRLENLIAQLPGEKKNGLFGNLIALSLGLTPNFKSNFDLAEDAKLQLSKDTYDCDLDNLLAQIGDQYADLFLAAKNLSDAILLSDILRVNTEITKAPLSASMIKRYDEHHQDLTLLKALVRQQLPEKYKEIFFDQSKNGYAGYIDGGASQEEFYKFIKPILEKMDGTEELLVKLNREDLLRKQRTFDNGSIPHQIHLGELHAILRRQEDFYPFLKDNREKIEKILTFRIPYYVGPLARGNSRFAWMTRKSEETITPWNFEEVVDKGASAQSFIERMTNFDKNLPNEKVLPKHSLLYEYFTVYNELTKVKYVTEGMRKPAFLSGEQKKAIVDLLFKTNRKVTVKQLKEDYFKKIESFDSVEISGVEDRFNASLGTYHDLLKIIKDKDFLDNEENEDILEDIVLTLTLFEDREMIEERLKTYAHLFDDKVMKQLKRRRYTGWGRLSRKLINGIRDKQSGKTILDFLKSDGFANRNFMQLIHDDSLTFKEDIQKAQVSGQGDSLHEHIANLAGSPAIKKGILQTVKVVDELVKVMGRHKPENIVIEMARENQTTQKGQKNSRERMKRIEEGIKELGSQILKEHPVENTQLQNEKLYLYYLQNGRDMYVDQELDINRLSDYDVDAIVPQSFLKDDSIDNKVLTRSDKNRGKSDNVPSEEVVKKMKNYWRQLLNAKLITQRKFDNLTKAERGGLSELDKAGFIKRQLVETRQITKHVAQILDSRMNTKYDENDKLIREVKVITLKSKLVSDFRKDFQFYKVREINNYHHAHDAYLNAVVGTALIKKYPKLESEFVYGDYKVYDVRKMIAKSEQEIGKATAKYFFYSNIMNFFKTEITLANGEIRKRPLIETNGETGEIVWDKGRDFATVRKVLSMPQVNIVKKTEVQTGGFSKESILPKRNSDKLIARKKDWDPKKYGGFDSPTVAYSVLVVAKVEKGKSKKLKSVKELLGITIMERSSFEKNPIDFLEAKGYKEVKKDLIIKLPKYSLFELENGRKRMLASAGELQKGNELALPSKYVNFLYLASHYEKLKGSPEDNEQKQLFVEQHKHYLDEIIEQISEFSKRVILADANLDKVLSAYNKHRDKPIREQAENIIHLFTLTNLGAPAAFKYFDTTIDRKRYTSTKEVLDATLIHQSITGLYETRIDLSQLGGD

SEQ ID NO: 1629 - protein, 1368 aa, Artificial Sequence
  Synthetic Sequence
MDKKYSIGLDIGTNSVGWAVITDEYKVPSKKFKVLGNTDRHSIKKNLIGALLFDSGETAEATRLKRTARRRYTRRKNRISYLQEIFSNEMAKVDDSFFHRLEESFLVEEDKKHERHPIFGNIVDEVAYHEKYPTIYHLRKKLVDSTDKADLRLIYLALAHMIKFRGHFLIEGDLNPDNSDVDKLFIQLVQTYNQLFEENPINASGVDAKAILSARLSKSRRLENLIAQLPGEKKNGLFGNLIALSLGLTPNFKSNFDLAEDAKLQLSKDTYDDDLDNLLAQIGDQYADLFLAAKNLSDAILLSDILRVNTEITKAPLSASMIKRYDEHHQDLTLLKALVRQQLPEKYKEIFFDQSKNGYAGYIDGGASQEEFYKFIKPILEKMDGTEELLVKLNREDLLRKQRTFDNGSIPHQIHLGELHAILRRQEDFYPFLKDNREKIEKILTFRIPYYVGPLARGNSRFAWMTRKSEETITPWNFEEVVDKGASAQSFIERMTNFDKNLPNEKVLPKHSLLYEYFTVYNELTKVKYVTEGMRKPAFLSGEQKKAIVDLLFKTNRKVTVKQLKEDYFKKIESFDSVEISGVEDRFNASLGTYHDLLKIIKDKDFLDNEENEDILEDIVLTLTLFEDREMIEERLKTYAHLFDDKVMKQLKRRRYTGWGRLSRKLINGIRDKQSGKTILDFLKSDGFANRNFMQLIHDDCLTFKEDIQKAQVSGQGDSLHEHIANLAGSPAIKKGILQTVKVVDELVKVMGRHKPENIVIEMARENQTTQKGQKNSRERMKRIEEGIKELGSQILKEHPVENTQLQNEKLYLYYLQNGRDMYVDQELDINRLSDYDVDHIVPQSFLKDDSIDNKVLTRSDKNRGKSDNVPSEEVVKKMKNYWRQLLNAKLITQRKFDNLTKAERGGLSELDKAGFIKRQLVETRQITKHVAQILDSRMNTKYDENDKLIREVKVITLKCKLVSDFRKDFQFYKVREINNYHHAHDAYLNAVVGTALIKKYPKLESEFVYGDYKVYDVRKMIAKSEQEIGKATAKYFFYSNIMNFFKTEITLANGEIRKRPLIETNGETGEIVWDKGRDFATVRKVLSMPQVNIVKKTEVQTGGFSKESILPKRNSDKLIARKKDWDPKKYGGFDSPTVAYSVLVVAKVEKGKSKKLKSVKELLGITIMERSSFEKNPIDFLEAKGYKEVKKDLIIKLPKYSLFELENGRKRMLASAGELQKGNELALPSKYVNFLYLASHYEKLKGSPEDNEQKQLFVEQHKHYLDEIIEQISEFSKRVILADANLDKVLSAYNKHRDKPIREQAENIIHLFTLTNLGAPAAFKYFDTTIDRKRYTSTKEVLDATLIHQSITGLYETRIDLSQLGGD

SEQ ID NO: 1630 - protein, 1368 aa, Artificial Sequence
  Synthetic Sequence
MDKKYSIGLAIGTNSVGWAVITDEYKVPSKKFKVLGNTDRHSIKKNLIGALLFDSGETAEATRLKRTARRRYTRRKNRISYLQEIFSNEMAKVDDSFFHRLEESFLVEEDKKHERHPIFGNIVDEVAYHEKYPTIYHLRKKLVDSTDKADLRLIYLALAHMIKFRGHFLIEGDLNPDNSDVDKLFIQLVQTYNQLFEENPINASGVDAKAILSARLSKSRRLENLIAQLPGEKKNGLFGNLIALSLGLTPNFKSNFDLAEDAKLQLSKDTYDDDLDNLLAQIGDQYADLFLAAKNLSDAILLSDILRVNTEITKAPLSASMIKRYDEHHQDLTLLKALVRQQLPEKYKEIFFDQSKNGYAGYIDGGASQEEFYKFIKPILEKMDGTEELLVKLNREDLLRKQRTFDNGSIPHQIHLGELHAILRRQEDFYPFLKDNREKIEKILTFRIPYYVGPLARGNSRFAWMTRKSEETITPWNFEEVVDKGASAQSFIERMTNFDKNLPNEKVLPKHSLLYEYFTVYNELTKVKYVTEGMRKPAFLSGEQKKAIVDLLFKTNRKVTVKQLKEDYFKKIESFDSVEISGVEDRFNASLGTYHDLLKIIKDKDFLDNEENEDILEDIVLTLTLFEDREMIEERLKTYAHLFDDKVMKQLKRRRYTGWGRLSRKLINGIRDKQSGKTILDFLKSDGFANRNFMQLIHDDCLTFKEDIQKAQVSGQGDSLHEHIANLAGSPAIKKGILQTVKVVDELVKVMGRHKPENIVIEMARENQTTQKGQKNSRERMKRIEEGIKELGSQILKEHPVENTQLQNEKLYLYYLQNGRDMYVDQELDINRLSDYDVDAIVPQSFLKDDSIDNKVLTRSDKNRGKSDNVPSEEVVKKMKNYWRQLLNAKLITQRKFDNLTKAERGGLSELDKAGFIKRQLVETRQITKHVAQILDSRMNTKYDENDKLIREVKVITLKCKLVSDFRKDFQFYKVREINNYHHAHDAYLNAVVGTALIKKYPKLESEFVYGDYKVYDVRKMIAKSEQEIGKATAKYFFYSNIMNFFKTEITLANGEIRKRPLIETNGETGEIVWDKGRDFATVRKVLSMPQVNIVKKTEVQTGGFSKESILPKRNSDKLIARKKDWDPKKYGGFDSPTVAYSVLVVAKVEKGKSKKLKSVKELLGITIMERSSFEKNPIDFLEAKGYKEVKKDLIIKLPKYSLFELENGRKRMLASAGELQKGNELALPSKYVNFLYLASHYEKLKGSPEDNEQKQLFVEQHKHYLDEIIEQISEFSKRVILADANLDKVLSAYNKHRDKPIREQAENIIHLFTLTNLGAPAAFKYFDTTIDRKRYTSTKEVLDATLIHQSITGLYETRIDLSQLGGD

SEQ ID NO: 1631 - protein, 20 aa, Artificial Sequence
  Synthetic sequence
AGFIKRQLVETRQITKHVAQ

SEQ ID NO: 1632 - protein, 20 aa, Artificial Sequence
  Synthetic sequence
AGFIQRQLVETRQITKHVAR

SEQ ID NO: 1633 - protein, 20 aa, Artificial Sequence
  Synthetic sequence
KKFIERNLVDTRYASRVVLN

SEQ ID NO: 1634 - protein, 20 aa, Artificial Sequence
  Synthetic sequence
KNFKDRNLNDTRYIARLVLN

SEQ ID NO: 1635 - protein, 19 aa, Artificial Sequence
  Synthetic sequence
GFKERNLNDTRYVNRFLCQ
